(19) United States
(12) Patent Application Publication
(10) Pub. No.: US 2023/0303660 A1
(43) Pub. Date: Sep. 28, 2023

(54) CO-STIMULATORY 4-1BBL ECTODOMAIN POLYPEPTIDES FOR IMMUNOMODULATION

(71) Applicant: Themis Bioscience GmbH, Vienna (AT)

(72) Inventors: Jochen STRITZKER, Kierling (AT); Peter STEINBERGER, Vienna (AT); Daniela LUPINEK, Vienna (AT); Annika DE SOUSA LINHARES, Michelndorf (AT)

(21) Appl. No.: 18/021,369

(22) PCT Filed: Aug. 17, 2021
(86) PCT No.: PCT/EP2021/072841

§ 371 Date: Feb. 14, 2023

(30) Foreign Application Priority Data
Aug. 17, 2020 (EP) 20191286.2

(51) Int. Cl. C07K 14/705; C12N 15/86; A61P 37/04

(52) U.S. Cl. CPC C07K 14/70578; C12N 15/86; A61P 37/04; C12N 2760/18443

(57) ABSTRACT

The present invention generally relates to the field of immunomodulation and provides various costimulatory polypeptides comprising at least one 4-1BBL ectodomain comprising a (core) minimal TNF Homology Domain. Further provided are vectors and oncolytic viruses expressing the 4-1BBL ectodomain and methods for producing the same. Additionally provided are 5 methods and uses for obtaining and optionally purifying the inherently oligomerizing 4-1BBL ectodomain polypeptides and associated oncolytic viruses for highly targeted cancer treatment, including the treatment of tumors. Finally, there are provided kits and uses of the polypeptides and vectors as disclosed.

### TECHNICAL FIELD

[0001] The present invention relates to the field of immunomodulation and provides various costimulatory polypeptides comprising at least one 4-1BBL ectodomain comprising a (core) minimal TNF Homology Domain. Further provided are vectors and oncolytic viruses expressing the 4-1BBL ectodomain polypeptides and methods for producing the same. Additionally provided are methods and uses for obtaining and optionally purifying the inherently oligomerizing 4-1BBL ectodomain polypeptides and associated oncolytic viruses for highly targeted cancer treatment. Finally, kits are provided and uses of the polypeptides and vectors are disclosed.

### BACKGROUND

[0002] Cancer immunotherapy is becoming of increasing interest for providing new cancer treatments. Specifically targeting cancerous cells by immune-oncolytic strategies emerges as a highly promising therapeutic way to obtain durable disease remission. Even though the immunotherapy is steadily changing the established treatment paradigms for cancer therapy and expanding the treatment options, the technology is still in its infancy and new improvements applicable to the clinic are needed.

[0003] Cancer immunotherapy generally involves or uses components of the immune system to attack cancerous cells in a patient's body and does not rely on the sole use of usually harsh chemotherapeutics, radiation etc. which often have severe side effects for a patient. Cancer immunotherapy approaches often aim at enhancing endogenous immune responses of a patient towards tumor-associated antigens (TAAs). Tumor antigens are usually divided in three classes. TAAs, tumor specific antigens (TSAs), and cancer germline antigens (CGAs). Whilst TSAs are only expressed in cancer cells (and not in healthy tissue), TAAs correspond to antigens usually expressed in healthy tissue/on healthy cells at low levels, but are overexpressed by certain tumor cells. In particular monoclonal antibodies (mAbs) have been the major tools to target TSAs and TAAs in cancer treatment in ongoing clinical trials over the last decades. Finally, CGAs are expressed in tumor cells of different histological origins, but they are silent in most normal adult cells.

[0004] In immunotherapy, an effective immune response requires two types of biological signal to fully activate T cells. The first signal, namely antigen-specific signal, is generated by the interaction of lymphocyte receptor with specific peptides bound to major histocompatibility complexes (MHC) molecules on antigen-presenting cells (APCs). The second signal is a co-stimulation signal, and is not antigen specific. This type of signal is provided upon interaction of costimulatory receptors expressed on T cells with their respective ligands expressed on APCs.

[0005] Strengthening the response of (endogenous) tumor-specific T cells is a viable strategy to combat cancers. To this end, these T-cells, but also other relevant immune effectors, including natural killer (NK) cells have to be efficiently stimulated via the relevant co-stimulatory complexes or molecules to present the second signal introduced above.

[0006] Thereby, it is long known that oligomerization of tumor necrosis family ligands such as CD40L is required for triggering of signaling pathways. Similarly, the membrane-bound form of Fas ligand (FasL) signals apoptosis in target cells through engagement of the death receptor Fas, while the proteolytically processed, soluble form of FasL does not induce cell death. Nevertheless, soluble FasL can be rendered active upon cross-linking and the oligomerization of FasL, is required for triggering of the signaling pathways (Holler et al, Molecular and Cellular Biology, February 2003, p. 1428-1440.). Holler et al. used the collagen domain of ACRP30 for achieving an oligomerization in vitro. Surprisingly however, the collagen domain did not result in trimerization but rather in a dimerization of FasL trimers.

[0007] More recently, specific co-stimulation of activated T-cells, NK cells, and other immune cells via the tumor necrosis factor receptor superfamily (TNFRSF) member 4-1BB (CD137) has emerged as a promising approach for cancer immunotherapy (Claus et al., Sci. Transl. Med. 11, eaav5989 (2019)). 4-1 BB is a type 1 transmembrane glycoprotein receptor belonging to the TNF superfamily, expressed on certain immune cells. 4-1BB/CD137 expression is very selective and can be found, e.g. on activated T Lymphocytes and NK cells.

[0008] 4-1BBL (abbreviation for: 4-1BB ligand, alternative name: CD137L) can e.g. be found on antigen-presenting cells (APCs) and is an agonistic binder of 4-1BB and therefore an interesting protein to stimulate T cells and other immune cells expressing 4-1BB. However, when using 4-1BBL in therapeutic settings, it has to be considered that the extracellular, non-cell associated 4-1BBL has very low activity as monomer.

[0009] Different strategies have been used to overcome this problem. First, agonistic 4-1BB antibodies (e.g. utomilumab (humanized IgG2 mAb), urelumab (human IgG4 mAb)) were designed (Chu et al., 2019, Int. J. Mol. Sci., 20). The above mAbs, however, were reported to result in severe toxicity and inflammation. Agonistic antibodies, for example, were shown to have significant systemic toxicity (e.g. urelumab), or relatively low efficacy (e.g. utomilumab) so that they never progressed beyond clinical trials (Claus et al., supra). Clustering of e.g. urelumab achieved through Fc gamma R-binding, is associated with liver toxicity (Claus et al., supra). One way to reduce systemic toxicities is to administer 4-1BB specific antibodies intratumorally (Chester et al., 2018, Blood, 131, 49-57) or an approach where “masked” antibodies become “unmasked” by tumor-specific protease activity, which was also reported by Chester et al.

[0010] Some cancer immunotherapies, for example, rely on artificial functional fragments of Abs, e.g. single-chain variable fragments (scFv) that may target TAAs/TSAs/CGAs in a highly specific manner. WO 2012/049328 A1 and WO 2019/234187 A1 disclose an engineered scFv fusion polypeptide based on the fusion of antibody-derived binding domains to a homotrimerization region, which yields trimeric scFv. Still, this trimerization of scFv-fragments antibody formats, or of single-domain antibody (sdAb) polypeptides via a trimerization domain has the disadvantage of having a dependence on the activity of each scFv-polypeptide as an Ab-derived recognition moiety being a non-natural molecule for the immune system of a patient. Therefore, scFv fragments and other Ab-derived polypeptides can comprise protein sequences recognized as “foreign” by the immune system, which could lead to the formation of a drug-specific immune response.

[0011] Claus et al. supra use an alternative strategy in which three individual 4-1 BBL ectodomains are fused to an immunoglobulin (Ig)-like protein, which also recognizes TAAs (i.e. FAP) for targeting of malignant cells. This approach, however, may not overcome undesired effects associated with the use of antibody-derived sequences.

[0012] Therefore, there is an increasing need in using naturally occurring, agonistic ligand sequences and a fully human or humanized system to avoid severe side effects for patients.

[0013] Another recent strategy in immuno-oncology is the adoptive transfer of specifically modified T-cells (chimeric antigen receptor (CAR)-modified T-cells), in particular, for patients that suffer from hematologic malignancies like leukemia and lymphoma. Zou and Jianyong (Journal of Hematology & Oncology, (2018) 11:130), for example, report a CAR-T-cell equipped with CD137 to test new chronic lymphocytic leukemia (CLL) therapies by providing a T-cell intracellular co-stimulatory signal via CD137. Still, CAR-T-cell therapy encounters multiple challenges when used to treat solid tumors, including the immunosuppressive tumor microenvironment and heterogeneity of antigen expression, which can presently not be solved by the use of CAR-T-cells as monotherapy. Further, the CAR T-cell-mediated therapy field embraced the challenge of applying this approach to treat common epithelial malignancies, which make up the majority of cancer cases, but evade immunologic attack by a variety of subversive mechanisms (Srivastava and Riddell, J. Immunol., 200(2): 459-468, 2018).

[0014] Another promising cancer immunotherapy in addition to Ab- and CAR-T-cell-based strategies relies on oncolytic viruses (OVs) that preferentially infect and kill cancer cells in a highly specific manner. OV-based cancer treatment is based on the selection of viruses having an intrinsic tropism for tumor cells, e.g. by binding to receptors that are (over)expressed on tumors and/or replicate selectively/preferentially in tumor cells. These viral vectors can thereby either directly kill infected tumor cells or increase their susceptibility to cell death and/or apoptosis. Beside the primary effect of tumor lysis, OVs can additionally stimulate the immune system to attack malignant cells. Tumors are usually an immuno-suppressive environment in which the immune system is silenced in order to avoid the immune response against the cancer cells. OVs thus may help to break this immune suppression to achieve a durable immune response against specific structures on tumor cells. Further, OVs can be specifically equipped with payloads to break checkpoints and/or to transform cold into hot tumors.

[0015] Another suggested technology reported for targeting 4-1 BB is the use of 4-1 BB-bispecific aptamer complexes, which are composed of an agonistic 4-1BB oligonucleotide aptamer conjugated to an aptamer that binds prostate-specific membrane antigen (PSMA) or vascular endothelial growth factor (Schrand et al., Cancer Immunol. Res., 2, 867-77, 2014).

[0016] Bispecific DART® molecules—polypeptides of PD-L1/4-1BB fused antibodies—are also in development. DARTs activate 4-1BB when they are “multimerized” on the cell surface via binding to PD-L1 (Berezhnoy et al, MacroGenics, Presented at the 30th EORTC/AACR/NCI Symposium, Nov. 13-16, 2018, Dublin, Ireland, Abstract 216, PB-067).

[0017] In another example, 4-1BBL trimerization or hexamerization could stimulate 4-1BB activation and was obtained by using Tenascin-C(TNC) and flag-antibodies (Wyzgol et al., K. Immunol., 2009, 183, 1851-61).

[0018] Other groups then tried to fuse the extracellular domains of 4-1BBL to the C-terminus of a modified form of core streptavidin (SA) resulting in SA-4-1BBL. The SA-4-1BBL molecule forms tetramers/oligomers, owing to the structural features of SA, and has the ability to cross-link 4-1BB receptors for potent costimulatory activity on T-cells. To this end, a specific 4-1BBL domain (amino acids (aa) 104-309) was used (Schabowsky et al., Vaccine, 2009, 28, 512-522).

[0019] From other groups, an AviTag-4-1BBL polypeptide was designed (Rabu et al., The Journal of Biological Chemistry, vol. 280, no. 50, pp. 41472-41481). The AviTag binds biotin which can then be used for fusion to (strept)avidin. A TNF-homology-domain, as such also comprising the N-terminal tail sequence (and thus a cysteine at position C51 within the extracellular domain of 4-1BBL) resulted in trimerization of 4-1 BBL, which was then further multimerized by binding to (strept)avidin.

[0020] Generally speaking, 4-1 BBL may have better efficacy and safety compared to Abs by delivering signals quantitatively and/or qualitatively different from those transduced by Abs. In general, full-length antibody-based approaches frequently result in antibody-dependent cellular toxicity, which is obviously deleterious when co-stimulatory effects are desired.

[0021] The currently known strategies to introduce 4-1 BB costimulatory signals to enhance immune responses against tumors have disadvantages:
[0022] A TNC chicken protein as used in Wyzgol et al. supra may favor trimerization, but it may cause a severe immune response against this chicken protein payload when applied to humans, as this portion will be recognized as foreign by the human immune system. In addition, TNC-trimerization alone does not seem to be optimal to sufficiently stimulate 4-1BB clustering and activation in functional cell culture assays.
[0023] (Strept)Avidin as cross linker of 4-1BBL has the major disadvantage of being a bacterial protein against which an immune response might be triggered that would strongly reduce therapeutic efficacy.
[0024] For the AviTag-approach the assembly process may represent an additional complication, as it requires both, purified AviTag-containing proteins as well as purified (strept)avidins. From a stoichiometry point of view, this cannot be easily maintained in an in vivo setting in a living organism.
[0025] Specifically, regarding the use of aptamers, their clinical benefit still has to be demonstrated and successful tumor targeting strategies in vivo are missing to date.
[0026] The approach detailed by Claus et al., supra, relies on a protein encoded by this approach that is much larger than in nature and targeting is dependent on a single molecule (i.e. a tumor associated antigen such as HER2), which might not be present in every tumor tissue within the patient, e.g. in metastases.
[0027] The PD-L1/4-1BB DART approach as disclosed in Berezhnoy et al., supra, can be problematic since a) not all cancer cells overexpress PD-L1 and b) numerous other healthy cells express PD-L1. Therefore, targeting the tumor is not guaranteed. Moreover, combinations with approved PD-L1 inhibitors might be problematic, as healthy cells expressing PD-L1 would also be affected, leading to unwanted toxic side effects.
[0028] Intratumoral injection of proteins is a problematic approach in clinical settings since the concentration of the injected protein constantly decreases and its half-life time cannot be determined reliably. Furthermore, with this approach T cells are not recruited into the tumor tissue.
[0029] Finally, protease-based techniques have the disadvantage that they might not be expressed in all malignant tissues as the absence of T cells in cold tumors places the active molecule away from target cells.

[0030] Additionally, all presently available non-Ab-based approaches targeting 4-1BB suffer from the inherent drawback that the use of non-human sequences in a potential therapeutic is necessary. These approaches are thus always confronted with the problem that undesired and partly severe side effects as caused by the immune system and as such hard to predict may arise so that there is an ongoing need to identify safer strategies for immuno-oncology.

[0031] Therefore, the 4-1BB activating molecules designed so far may function well in in vitro settings, but they all are associated with major disadvantages when it comes to the use as safe and effective therapeutics in patients.

[0032] Another problem associated with the various 4-1BB activating molecules designed so far is the fact that the molecule as such can cause unwanted toxicities if it cannot be targeted to the relevant tumor, or to the site of interest in a patient's body in functional, i.e., usually trimerized, state.

[0033] An additional immunotherapeutic strategy is the use of oncolytic viruses as promising strategy against cancer, including solid tumors. Oncolytic viruses (OVs), including vaccinia virus, myxoma virus, adenovirus, herpes virus, reovirus, Zika virus, vesicular stomatitis virus, parvovirus, poliovirus, influenza virus, arenavirus, coxsackie virus, semliki forest virus, sindbis virus, maraba virus, seneca valley virus, Newcastle disease virus, mumps virus, and measles virus, including 1957 Leningrad-derived strains, for example Leningrad-4, and Cangchun-47, 1960 Shanghai-derived strains, for example Shanghai-191, 1968 Tanabe-derived strains, such as CAM-70, as well as Edmonston-derived strains, for example, Edmonston Seed “B”, AIK-C, Moraten, Schwarz, Rubeovax, and Zagreb, can efficiently target cancer cells, but not normal cells, leading to lysis of the tumor mass. OVs derived from attenuated viruses are usually per se safe for use as vaccines or therapeutics. Beside this primary effect, OVs can also stimulate the immune system. Tumors are an immuno-suppressive environment in which the immune system is silenced in order to avoid the immune response against cancer cells. The delivery of OVs into the tumor activates the immune system so that it can facilitate a strong and durable response against the tumor itself. Both innate and adaptive immune responses contribute to this process, producing an immune response against tumor antigens and facilitating immunological memory (Marelli et al., Front. Immunol. 2018; 9:866). Further, an OV of interest can be equipped with different payloads of interest to optimize the anti-tumor response. Further, OVs can be used together with other therapeutics including immunomodulatory molecules such as checkpoint inhibitors. Checkpoint inhibitors are a class of molecules blocking the negative regulators of T-cell function (immune checkpoints), thereby increasing T-cell activation to enhance cancer immunotherapy in a targeted way (LaRocca and Warner, Clin. Transl. Med., 2018; 7:35).

[0034] It was thus an objective of the present invention to provide novel polypeptides with 4-1BB stimulating activity that are designed to address known features of 4-1 BB activation. This includes necessary clustering of the activated receptor but shows reduced toxicity in comparison to known agonistic antibodies and is able to induce a signal that is qualitatively equal to the natural ligand. In particular, a functional 4-1BBL in multimeric form should be designed that uses human-derived sequences only to reduce the risk of side-effects and anti-drug immune responses.

[0035] Moreover, it was an objective to identify tumor-specific expression strategies for the 4-1BB stimulating molecules to further reduce the chance of systemic toxicity and simultaneously to enhance a tumor-specific T cell response by providing in situ expression and functional assembly of the 4-1BB stimulating molecules overcoming the problems as presently associated with 4-1BB cargos. To this end, new strategies for the treatment of cancer should be established. Finally, it was an object to provide a strategy for the enhanced recruitment of T-cells into a tumor tissue, i.e. to break immuno-tolerance in certain tumor tissues and to induce a targeted anti-tumor inflammatory response.

### SUMMARY OF THE INVENTION

[0036] To address the above objects, in a first aspect, there is thus provided a costimulatory polypeptide comprising (a) (i) at least one 4-1BBL ectodomain and a trimerization domain, and/or (ii) at least one 4-1 BBL ectodomain and at least one leader sequence, and optionally at least one affinity tag; wherein each 4-1 BBL ectodomain comprises or consists of the minimal Tumor Necrosis Factor (TNF) Homology Domain according to SEQ ID NO: 1, or a core minimal Tumor Necrosis Factor (TNF) Homology Domain according to any one of SEQ ID NOs: 149 to 155, or a sequence having at least 92%, 93%, 94%, 95%, 96%, 97%, 98% or 99% sequence identity to SEQ ID NO: 1, or 149 to 155, or a nucleic acid sequence encoding the polypeptide; and/or (b) at least three 4-1BBL ectodomains, and optionally comprising at least one trimerization domain, wherein each 4-1BBL ectodomain comprises or consists of the minimal TNF Homology Domain according to SEQ ID NO: 1, or a core minimal Tumor Necrosis Factor (TNF) Homology Domain according to any one of SEQ ID NOs: 149 to 155, or a sequence having at least 92%, 93%, 94%, 95%, 96%, 97%, 98% or 99% sequence identity to SEQ ID NO: 1, or 149 to 155, or a nucleic acid sequence encoding the polypeptide; and wherein the 4-1BBL ectodomain does not comprise the cysteine residue at position 51 of the naturally occurring human 4-1BBL ectodomain as shown in SEQ ID NO: 2, or a nucleic acid sequence encoding the same; and wherein the polypeptide binds to 4-1BB on the surface of a 4-1BB expressing cell and thus triggers 4-1BB-mediated immune cell stimulation.

[0037] In one aspect, there is thus provided a costimulatory polypeptide comprising (i) at least one 4-1BBL ectodomain and a trimerization domain, and/or (ii) at least one 4-1BBL ectodomain and at least one leader sequence, and optionally at least one affinity tag; wherein each 4-1BBL ectodomain consists of a minimal Tumor Necrosis Factor (TNF) Homology Domain of less than 170 amino acids that comprises amino acids 90-240 of SEQ ID NO: 2, or a sequence having at least 92%, 93%, 94%, 95%, 96%, 97%, 98% or 99% sequence identity to amino acids 90-240 of SEQ ID NO: 2; wherein the polypeptide binds to 4-1BB on the surface of a 4-1BB expressing cell and thus triggers 4-1BB-mediated immune cell stimulation.

[0038] In specific embodiments of this first aspect, the trimerization domain of any of the preceding costimulatory polypeptides is selected from SEQ ID NO: 7 or 8.

[0039] In a second aspect of the present invention, there is provided a costimulatory polypeptide, comprising (a) (i) at least one 4-1BBL ectodomain and a trimerization domain, and/or (ii) at least one 4-1BBL ectodomain and at least one leader sequence, and optionally at least one affinity tag; preferably wherein each 4-1 BBL ectodomain comprises a minimal Tumor Necrosis Factor (TNF) Homology Domain according to SEQ ID NO: 1, or a core minimal Tumor Necrosis Factor (TNF) Homology Domain according to any one of SEQ ID NOs: 149 to 155, or a sequence having at least 90%, 91%, 92%, 93%, 94%, 95%, 96%, 97%, 98% or 99% sequence identity to SEQ ID NO: 1, or 149 to 155, respectively, or a nucleic acid sequence encoding such costimulatory polypeptide, wherein the trimerization domain is a human or humanized trimerization domain; and wherein the 4-1BBL ectodomain comprises or consists of a sequence according to SEQ ID NOs: 3 to 6 or a polypeptide with a sequence having at least 90%, 91%, 92%, 93%, 94%, 95%, 96%, 97%, 98% or 99% sequence identity to the respective sequence, or a nucleic acid sequence encoding the same.

[0040] In specific embodiments, the at least one 4-1BBL ectodomain of the costimulatory polypeptide comprises the amino acid sequence of SEQ ID NO: 3, or a polypeptide with a sequence having at least 90%, 91%, 92%, 93%, 94%, 95%, 96%, 97%, 98% or 99% sequence identity to SEQ ID NO: 3, or a nucleic acid sequence encoding the same and a human or humanized trimerization domain. In specific embodiments, the at least one 4-1BBL ectodomain of the costimulatory polypeptide comprises SEQ ID NO: 4, or a polypeptide with a sequence having at least 90%, 91%, 92%, 93%, 94%, 95%, 96%, 97%, 98% or 99% sequence identity to SEQ ID NO: 4, or a nucleic acid sequence encoding the same and a human or humanized trimerization domain. In specific embodiments, the at least one 4-1BBL ectodomain of the costimulatory polypeptide comprises SEQ ID NO: 5, or a polypeptide with a sequence having at least 90%, 91%, 92%, 93%, 94%, 95%, 96%, 97%, 98% or 99% sequence identity to SEQ ID NO: 5, or a nucleic acid sequence encoding the same and a human or humanized trimerization domain. In specific embodiments, the at least one 4-1BBL ectodomain of the costimulatory polypeptide comprises SEQ ID NO:6, or a polypeptide with a sequence having at least 90%, 91%, 92%, 93%, 94%, 95%, 96%, 97%, 98% or 99% sequence identity to SEQ ID NO: 6, or a nucleic acid sequence encoding the same and a human or humanized trimerization domain.

[0041] In another embodiment of the above aspect, is any one of the preceding costimulatory polypeptides or embodiments thereof, wherein the polypeptide comprises at least one linker. In specific embodiments, the at least one linker comprises or consists of a sequence individually selected from the group consisting of SEQ ID NOs: 9 to 16, or a sequence having at least 90%, 91%, 92%, 93%, 94%, 95%, 96%, 97%, 98% or 99% sequence identity to any one of the sequences SEQ ID NOs: 9 to 16, or a nucleic acid sequence encoding the same. In specific embodiments, the at least one linker comprises or consists of the amino acid sequence of SEQ ID NO: 9, or a sequence having at least 90%, 91%, 92%, 93%, 94%, 95%, 96%, 97%, 98% or 99% sequence identity to SEQ ID NO: 9, or a nucleic acid sequence encoding the same. In specific embodiments, the at least one linker comprises or consists of the amino acid sequence of SEQ ID NO: 10, or a sequence having at least 90%, 91%, 92%, 93%, 94%, 95%, 96%, 97%, 98% or 99% sequence identity to SEQ ID NO: 10, or a nucleic acid sequence encoding the same. In specific embodiments, the at least one linker comprises or consists of the amino acid sequence of SEQ ID NO: 11, or a sequence having at least 90%, 91%, 92%, 93%, 94%, 95%, 96%, 97%, 98% or 99% sequence identity to SEQ ID NO: 11, or a nucleic acid sequence encoding the same. In specific embodiments, the at least one linker comprises or consists of the amino acid sequence of SEQ ID NO: 12, or a sequence having at least 90%, 91%, 92%, 93%, 94%, 95%, 96%, 97%, 98% or 99% sequence identity to SEQ ID NO: 12, or a nucleic acid sequence encoding the same. In specific embodiments, the at least one linker comprises or consists of the amino acid sequence of SEQ ID NO: 13, or a sequence having at least 90%, 91%, 92%, 93%, 94%, 95%, 96%, 97%, 98% or 99% sequence identity to SEQ ID NO: 13, or a nucleic acid sequence encoding the same. In specific embodiments, the at least one linker comprises or consists of the amino acid sequence of SEQ ID NO: 14, or a sequence having at least 90%, 91%, 92%, 93%, 94%, 95%, 96%, 97%, 98% or 99% sequence identity to SEQ ID NO: 14, or a nucleic acid sequence encoding the same. In specific embodiments, the at least one linker comprises or consists of the amino acid sequence of SEQ ID NO: 15, or a sequence having at least 90%, 91%, 92%, 93%, 94%, 95%, 96%, 97%, 98% or 99% sequence identity to SEQ ID NO: 15, or a nucleic acid sequence encoding the same. In specific embodiments, the at least one linker comprises or consists of the amino acid sequence of SEQ ID NO: 16, or a sequence having at least 90%, 91%, 92%, 93%, 94%, 95%, 96%, 97%, 98% or 99% sequence identity to SEQ ID NO: 16, or a nucleic acid sequence encoding the same.

[0042] In specific embodiments of the above aspects or any one of the preceding costimulatory polypeptides or embodiments thereof, the costimulatory polypeptide, or the sequence encoding the same, additionally comprises at least one affinity tag and/or at least one protease cleavage tag and/or at least one inhibitory domain and/or at least one leader sequence or nucleic acid encoding the same. In specific embodiments, the costimulatory polypeptide, or the sequence encoding the same, additionally comprises at least one affinity tag or nucleic acid encoding the same. In specific embodiments, the costimulatory polypeptide, or the sequence encoding the same, additionally comprises at least one protease cleavage tag or nucleic acid encoding the same. In specific embodiments, the costimulatory polypeptide, or the sequence encoding the same, additionally comprises at least one inhibitory domain or nucleic acid encoding the same. In specific embodiments, the costimulatory polypeptide, or the sequence encoding the same, additionally comprises at least one leader sequence or nucleic acid encoding the same.

[0043] In specific embodiments, the costimulatory polypeptide, or the sequence encoding the same, additionally comprises at least one affinity tag or nucleic acid encoding the same and at least one protease cleavage tag or nucleic acid encoding the same. In specific embodiments, the costimulatory polypeptide, or the sequence encoding the same, additionally comprises at least one affinity tag or nucleic acid encoding the same and at least one inhibitory domain or nucleic acid encoding the same. In specific embodiments, the costimulatory polypeptide, or the sequence encoding the same, additionally comprises at least one affinity tag or nucleic acid encoding the same and at least one leader sequence or nucleic acid encoding the same. In specific embodiments, the costimulatory polypeptide, or the sequence encoding the same, additionally comprises at least one protease cleavage tag or nucleic acid encoding the same and at least one inhibitory domain or nucleic acid encoding the same. In specific embodiments, the costimulatory polypeptide, or the sequence encoding the same, additionally comprises at least one protease cleavage tag or nucleic acid encoding the same and at least one leader sequence or nucleic acid encoding the same. In specific embodiments, the costimulatory polypeptide, or the sequence encoding the same, additionally comprises at least one inhibitory domain or nucleic acid encoding the same and at least one leader sequence or nucleic acid encoding the same. In specific embodiments, the costimulatory polypeptide, or the sequence encoding the same, additionally comprises at least one affinity tag or nucleic acid encoding the same, at least one protease cleavage tag or nucleic acid encoding the same, and at least one inhibitory domain or nucleic acid encoding the same. In specific embodiments, the costimulatory polypeptide, or the sequence encoding the same, additionally comprises at least one affinity tag or nucleic acid encoding the same, at least one protease cleavage tag or nucleic acid encoding the same, and at least one leader sequence or nucleic acid encoding the same. In specific embodiments, the costimulatory polypeptide, or the sequence encoding the same, additionally comprises at least one affinity tag or nucleic acid encoding the same, at least one inhibitory domain or nucleic acid encoding the same, and at least one leader sequence or nucleic acid encoding the same. In specific embodiments, the costimulatory polypeptide, or the sequence encoding the same, additionally comprises at least one affinity tag or nucleic acid encoding the same, at least one protease cleavage tag or nucleic acid encoding the same, at least one inhibitory domain or nucleic acid encoding the same, and at least one leader sequence or nucleic acid encoding the same.

[0044] In yet another embodiment of the above aspect, is any one of the preceding costimulatory polypeptides or embodiments thereof, wherein the costimulatory polypeptide is encoded by a nucleic acid sequence selected from the group consisting of SEQ ID NOs: 47, 49, 51, 53, 55, 57, 59, 61, 63, 65, 67, 69, 71, 73, 75, 77 or 79 or a sequence having at least 70%, 71%, 72%, 73%, 74%, 75%, 76%, 77%, 78%, 79%, 80%, 81%, 82%, 83%, 84%, 85%, 86%, 87%, 88%, 89%, 90%, 91%, 92%, 93%, 94%, 95%, 96%, 97%, 98% or 99% sequence identity to any one of the sequences SEQ ID NOs: 47, 49, 51, 53, 55, 57, 59, 61, 63, 65, 67, 69, 71, 73, 75, 77 or 79. In a specific embodiment, the costimulatory polypeptide is encoded by a nucleic acid sequence of SEQ ID NO: 47 or a sequence having at least 70%, 71%, 72%, 73%, 74%, 75%, 76%, 77%, 78%, 79%, 80%, 81%, 82%, 83%, 84%, 85%, 86%, 87%, 88%, 89%, 90%, 91%, 92%, 93%, 94%, 95%, 96%, 97%, 98% or 99% sequence identity to SEQ ID NO: 47. In a specific embodiment, the costimulatory polypeptide is encoded by a nucleic acid sequence of SEQ ID NO: 49 or a sequence having at least 70%, 71%, 72%, 73%, 74%, 75%, 76%, 77%, 78%, 79%, 80%, 81%, 82%, 83%, 84%, 85%, 86%, 87%, 88%, 89%, 90%, 91%, 92%, 93%, 94%, 95%, 96%, 97%, 98% or 99% sequence identity to SEQ ID NO: 49. In a specific embodiment, the costimulatory polypeptide is encoded by a nucleic acid sequence of SEQ ID NO: 51 or a sequence having at least 70%, 71%, 72%, 73%, 74%, 75%, 76%, 77%, 78%, 79%, 80%, 81%, 82%, 83%, 84%, 85%, 86%, 87%, 88%, 89%, 90%, 91%, 92%, 93%, 94%, 95%, 96%, 97%, 98% or 99% sequence identity to SEQ ID NO: 51. In a specific embodiment, the costimulatory polypeptide is encoded by a nucleic acid sequence of SEQ ID NO: 53 or a sequence having at least 70%, 71%, 72%, 73%, 74%, 75%, 76%, 77%, 78%, 79%, 80%, 81%, 82%, 83%, 84%, 85%, 86%, 87%, 88%, 89%, 90%, 91%, 92%, 93%, 94%, 95%, 96%, 97%, 98% or 99% sequence identity to SEQ ID NO: 53. In a specific embodiment, the costimulatory polypeptide is encoded by a nucleic acid sequence of SEQ ID NO: 55 or a sequence having at least 70%, 71%, 72%, 73%, 74%, 75%, 76%, 77%, 78%, 79%, 80%, 81%, 82%, 83%, 84%, 85%, 86%, 87%, 88%, 89%, 90%, 91%, 92%, 93%, 94%, 95%, 96%, 97%, 98% or 99% sequence identity to SEQ ID NO: 55. In a specific embodiment, the costimulatory polypeptide is encoded by a nucleic acid sequence of SEQ ID NO: 57 or a sequence having at least 70%, 71%, 72%, 73%, 74%, 75%, 76%, 77%, 78%, 79%, 80%, 81%, 82%, 83%, 84%, 85%, 86%, 87%, 88%, 89%, 90%, 91%, 92%, 93%, 94%, 95%, 96%, 97%, 98% or 99% sequence identity to SEQ ID NO: 57. In a specific embodiment, the costimulatory polypeptide is encoded by a nucleic acid sequence of SEQ ID NO: 59 or a sequence having at least 70%, 71%, 72%, 73%, 74%, 75%, 76%, 77%, 78%, 79%, 80%, 81%, 82%, 83%, 84%, 85%, 86%, 87%, 88%, 89%, 90%, 91%, 92%, 93%, 94%, 95%, 96%, 97%, 98% or 99% sequence identity to SEQ ID NO: 59. In a specific embodiment, the costimulatory polypeptide is encoded by a nucleic acid sequence of SEQ ID NO: 61 or a sequence having at least 70%, 71%, 72%, 73%, 74%, 75%, 76%, 77%, 78%, 79%, 80%, 81%, 82%, 83%, 84%, 85%, 86%, 87%, 88%, 89%, 90%, 91%, 92%, 93%, 94%, 95%, 96%, 97%, 98% or 99% sequence identity to SEQ ID NO: 61. In a specific embodiment, the costimulatory polypeptide is encoded by a nucleic acid sequence of SEQ ID NO: 63 or a sequence having at least 70%, 71%, 72%, 73%, 74%, 75%, 76%, 77%, 78%, 79%, 80%, 81%, 82%, 83%, 84%, 85%, 86%, 87%, 88%, 89%, 90%, 91%, 92%, 93%, 94%, 95%, 96%, 97%, 98% or 99% sequence identity to SEQ ID NO: 63. In a specific embodiment, the costimulatory polypeptide is encoded by a nucleic acid sequence of SEQ ID NO: 65 or a sequence having at least 70%, 71%, 72%, 73%, 74%, 75%, 76%, 77%, 78%, 79%, 80%, 81%, 82%, 83%, 84%, 85%, 86%, 87%, 88%, 89%, 90%, 91%, 92%, 93%, 94%, 95%, 96%, 97%, 98% or 99% sequence identity to SEQ ID NO: 65. In a specific embodiment, the costimulatory polypeptide is encoded by a nucleic acid sequence of SEQ ID NO: 67 or a sequence having at least 70%, 71%, 72%, 73%, 74%, 75%, 76%, 77%, 78%, 79%, 80%, 81%, 82%, 83%, 84%, 85%, 86%, 87%, 88%, 89%, 90%, 91%, 92%, 93%, 94%, 95%, 96%, 97%, 98% or 99% sequence identity to SEQ ID NO: 67. In a specific embodiment, the costimulatory polypeptide is encoded by a nucleic acid sequence of SEQ ID NO: 69 or a sequence having at least 70%, 71%, 72%, 73%, 74%, 75%, 76%, 77%, 78%, 79%, 80%, 81%, 82%, 83%, 84%, 85%, 86%, 87%, 88%, 89%, 90%, 91%, 92%, 93%, 94%, 95%, 96%, 97%, 98% or 99% sequence identity to SEQ ID NO: 69. In a specific embodiment, the costimulatory polypeptide is encoded by a nucleic acid sequence of SEQ ID NO: 71 or a sequence having at least 70%, 71%, 72%, 73%, 74%, 75%, 76%, 77%, 78%, 79%, 80%, 81%, 82%, 83%, 84%, 85%, 86%, 87%, 88%, 89%, 90%, 91%, 92%, 93%, 94%, 95%, 96%, 97%, 98% or 99% sequence identity to SEQ ID NO: 71. In a specific embodiment, the costimulatory polypeptide is encoded by a nucleic acid sequence of SEQ ID NO: 73 or a sequence having at least 70%, 71%, 72%, 73%, 74%, 75%, 76%, 77%, 78%, 79%, 80%, 81%, 82%, 83%, 84%, 85%, 86%, 87%, 88%, 89%, 90%, 91%, 92%, 93%, 94%, 95%, 96%, 97%, 98% or 99% sequence identity to SEQ ID NO: 73. In a specific embodiment, the costimulatory polypeptide is encoded by a nucleic acid sequence of SEQ ID NO: 75 or a sequence having at least 70%, 71%, 72%, 73%, 74%, 75%, 76%, 77%, 78%, 79%, 80%, 81%, 82%, 83%, 84%, 85%, 86%, 87%, 88%, 89%, 90%, 91%, 92%, 93%, 94%, 95%, 96%, 97%, 98% or 99% sequence identity to SEQ ID NO: 75. In a specific embodiment, the costimulatory polypeptide is encoded by a nucleic acid sequence of SEQ ID NO: 77 or a sequence having at least 70%, 71%, 72%, 73%, 74%, 75%, 76%, 77%, 78%, 79%, 80%, 81%, 82%, 83%, 84%, 85%, 86%, 87%, 88%, 89%, 90%, 91%, 92%, 93%, 94%, 95%, 96%, 97%, 98% or 99% sequence identity to SEQ ID NO: 77. In a specific embodiment, the costimulatory polypeptide is encoded by a nucleic acid sequence of SEQ ID NO: 79 or a sequence having at least 70%, 71%, 72%, 73%, 74%, 75%, 76%, 77%, 78%, 79%, 80%, 81%, 82%, 83%, 84%, 85%, 86%, 87%, 88%, 89%, 90%, 91%, 92%, 93%, 94%, 95%, 96%, 97%, 98% or 99% sequence identity to SEQ ID NO: 79.

[0045] In a third aspect, there is provided a vector comprising a nucleic acid sequence encoding a costimulatory polypeptide according to any one of the preceding costimulatory polypeptides of the first or second aspect or embodiments thereof.

[0046] In one embodiment of the above aspect, the vector comprises a sequence encoding an oncolytic virus, capable of expressing the costimulatory polypeptide. In specific embodiments, the oncolytic virus is selected from the group consisting of a vaccinia virus, a myxoma virus, an adenovirus, a herpes virus, a reovirus, a Zika virus, a vesicular stomatitis virus, a parvovirus, a poliovirus, an influenza virus, an arenavirus, a coxsackie virus, a semliki forest virus, a sindbis virus, a maraba virus, a seneca valley virus, a Newcastle disease virus, a mumps virus, and a measles virus, including 1957 Leningrad-derived strains, for example Leningrad-4, and Cangchun-47, 1960 Shanghai-derived strains, for example Shanghai-191, 1968 Tanabe-derived strains, such as CAM-70, as well as Edmonston-derived strains, for example, Edmonston See “B”, AIK-C, Moraten, Schwarz, Rubeovax, and Zagreb, or combinations or a chimera thereof.

[0047] In another embodiment of the above aspect, there is provided an oncolytic virus encoded by a vector according to the second aspect or embodiments thereof, wherein the oncolytic virus comprises a costimulatory polypeptide according to the first or second aspect of the present invention. The encoded costimulatory polypeptide functions as the payload.

[0048] In a fourth aspect, there is provided a method of producing a costimulatory polypeptide the method comprising: (i) providing a vector according to the above third aspect and embodiments thereof encoding a costimulatory polypeptide, (ii) introducing the vector into a host cell; (iii) culturing the host cell under conditions suitable for expression of the costimulatory polypeptide; (iv) optionally: isolating and purifying the costimulatory polypeptide; and (v) obtaining the costimulatory 4-1BBL polypeptide.

[0049] In a fifth aspect, there is provided a method of producing an oncolytic virus expressing a costimulatory polypeptide, the method comprising: (i) providing a vector as defined according to the second aspect and embodiments thereof encoding an oncolytic virus comprising the costimulatory polypeptide, (ii) introducing the vector into a host cell, (iii) culturing the host cell under conditions suitable for expression and thus replication of the oncolytic virus, (iv) optionally: rescuing the oncolytic virus; (v) optionally: purifying the oncolytic virus as obtained in step (iii) or (iv); and (vi) obtaining an oncolytic virus.

[0050] In a sixth aspect, there is provided a pharmaceutical composition comprising a costimulatory polypeptide according to the first or second aspect and embodiments thereof as defined above and/or an oncolytic virus according to the third aspect and embodiments thereof as defined above, and/or as obtained according to the fifth aspect of the present invention as defined above, optionally further comprising at least one pharmaceutically acceptable carrier and/or optionally comprising, in combination with the costimulatory polypeptide, at least one further pharmaceutically active ingredient, the further pharmaceutically active ingredient being selected from at least one chemotherapeutic agent, at least one antibody, antibody-like molecule or antibody mimetic, or at least one checkpoint modulator, particularly a checkpoint inhibitor.

[0051] In a seventh aspect of the present invention, there is provided a costimulatory polypeptide according to the first or second aspect and embodiments thereof as defined above, and/or an oncolytic virus according to the third aspect and embodiments thereof as defined above, and/or as obtained according to the fifth aspect as defined above for use in a method of treating cancer.

[0052] There is thus provided a method of treating a cancer in a subject by providing a costimulatory polypeptide and/or an oncolytic virus expressing a costimulatory polypeptide of the present invention. In a specific embodiment, the method of treating a cancer in a subject comprises providing a costimulatory polypeptide. In a specific embodiment, the method of treating a cancer in a subject comprises providing an oncolytic virus expressing a costimulatory polypeptide. In a specific embodiment, the method of treating a cancer in a subject comprises providing a first costimulatory polypeptide and providing an oncolytic virus expressing a second costimulatory polypeptide. In a specific embodiment, the first costimulatory polypeptide and the second costimulatory polypeptide have the same sequence. In a specific embodiment, the first costimulatory polypeptide and the second costimulatory polypeptide have different sequences.

[0053] Further provided is the use of an effective amount of costimulatory polypeptide and/or an effective amount of oncolytic virus expressing a costimulatory polypeptide of the present invention in a method of treating cancer in a subject in need thereof. In a specific embodiment, the disclosure provides use of an effective amount of costimulatory polypeptide of the present invention in a method of treating cancer in a subject in need thereof. In a specific embodiment, the disclosure provides use of an effective amount of oncolytic virus expressing a costimulatory polypeptide of the present invention in a method of treating cancer in a subject in need thereof. In a specific embodiment, the disclosure provides use of an effective amount of first costimulatory polypeptide of the invention and an effective amount of oncolytic virus expressing an effective amount of second costimulatory polypeptide in a method of treating cancer in a subject in need thereof. In a specific embodiment, the first costimulatory polypeptide and the second costimulatory polypeptide have the same sequence. In a specific embodiment, the first costimulatory polypeptide and the second costimulatory polypeptide have different sequences.

[0054] Further provided is use of an effective amount of costimulatory polypeptide and/or an effective amount of oncolytic virus expressing a costimulatory polypeptide of the present invention in the manufacture of a medicament for the treatment of cancer in a subject in need thereof. In a specific embodiment, the disclosure provides use of an effective amount of costimulatory polypeptide of the present invention in the manufacture of a medicament for the treatment of cancer in a subject in need thereof. In a specific embodiment, the disclosure provides use of an effective amount of oncolytic virus expressing a costimulatory polypeptide of the present invention in the manufacture of a medicament for the treatment of cancer in a subject in need thereof. In a specific embodiment, the disclosure provides use of a first costimulatory polypeptide of the invention and an oncolytic virus expressing a second costimulatory polypeptide in the manufacture of a medicament for the treatment of cancer in a subject in need thereof. In a specific embodiment, the first costimulatory polypeptide and the second costimulatory polypeptide have the same sequence. In a specific embodiment, the first costimulatory polypeptide and the second costimulatory polypeptide have different sequences.

[0055] In one embodiment of the foregoing: (i) methods of treating cancer, (ii) uses in a method of treating cancer, or (iii) uses in the manufacture of a medicament for treating cancer, the cancer is selected from bladder cancer, breast cancer, prostate cancer, basal cell carcinoma, biliary tract cancer, bone cancer, brain and central nervous system cancer (e.g., glioma), adenocarcinomas, lung cancer, cervical cancer, choriocarcinoma, colon and rectum cancer, connective tissue cancer, cancer of the digestive system; cancer of the small intestine and cecum; endometrial cancer, esophageal cancer; eye cancer; cancer of the head and neck; gastric cancer; intra-epithelial neoplasm; kidney cancer; larynx cancer; leukemia; liver cancer; gall bladder cancer lung cancer (e.g., small cell and non-small cell); lymphoma including Hodgkin's and Non-Hodgkin's lymphoma; melanoma; myeloma, neuroblastoma, oral cavity cancer (e.g., lip, tongue, mouth, and pharynx); cancer of the salivary glands; ovarian cancer; pancreatic cancer, retinoblastoma; rhabdomyosarcoma; rectal cancer, renal cancer, cancer of the respiratory system; sarcoma, skin cancer; stomach cancer, testicular cancer, thyroid cancer; uterine cancer, cancer of the urinary system, as well as other carcinomas and sarcomas.

[0056] In another embodiment of the foregoing: (i) methods of treating cancer, (ii) uses in a method of treating cancer, or (iii) uses in the manufacture of a medicament for treating cancer, the cancer is a cold tumor or a hot tumor.

[0057] In an eighth aspect of the present invention, there is provided a kit comprising a costimulatory polypeptide according to the above first or second aspect or an embodiment thereof, or an oncolytic virus expressing a costimulatory polypeptide according to above third aspect or an embodiment thereof, optionally wherein the kit comprising further reagents.

[0058] In an ninth aspect, there is provided the use of an effective amount of costimulatory polypeptide according to the above first or second aspect or an embodiment thereof, or of an effective amount of oncolytic virus expressing a costimulatory polypeptide according to the above third aspect or an embodiment thereof in an in vitro method for stimulating 4-1BB expressing cells.

[0059] Further details of the present invention will now be disclosed in detail in the following with additional reference to the attached Drawings, Sequences and the below Examples.

### BRIEF DESCRIPTION OF DRAWINGS

[0060] FIG. 1A shows the graphical representation of the polypeptides MAb1-scFv and MAb1-scFv-Tri_{XVIII}. FIG. 1B shows the expression levels of 4-1 BB on 4-1 BB reporter cells as well as the expression levels of anti-CD3 and 4-1BBL on TCS-Ctrl and TCS-4-1BBL cells (white histograms: control cells not expressing the target molecule, grey histograms: cells that are indicated in respective heading). FIG. 1C shows the results of the binding assay of the polypeptides MAb1-scFv and MAb1-scFv-Tri_{XVIII} to Ctrl reporter and 4-1BB reporter cells as histograms or bar charts. FIG. 1D shows the results of the functional assay of the polypeptides MAb1-scFv and MAb1-scFv-Tri_{XVIII} using Ctrl reporter and 4-1 BB reporter cells. Results are shown as “Fold induction” of NF-κB-dependent eCFP expression, normalized to stimulation with TCS-Ctrl.

[0061] FIG. 2A shows the graphical representation of the polypeptides MAb2-scFv and MAb2-scFv-Tri_{XVIII}. FIG. 2B shows the results of the binding assay of the polypeptides MAb2-scFv and MAb2-scFv-Tri_{XVIII} to Ctrl reporter and 4-1BB reporter cells as histograms. FIG. 2C shows the results of the functional assay of the polypeptides MAb2-scFv and MAb2-scFv-Tri_{XVIII} using Ctrl reporter and 4-1BB reporter cells. Results are shown as “Fold induction” of NF-κB-dependent eCFP expression, normalized to stimulation with TCS-Ctrl.

[0062] FIG. 3A shows the graphical representation of the polypeptides s4-1 BBL and s4-1BBL-Tri_{XVIII}^{LL}. FIG. 3B shows the results of the binding assay of the polypeptides s4-1BBL and s4-1BBL-Tri_{XVIII}^{LL} to Ctrl reporter and 4-1 BB reporter cells as histograms or bar charts. FIG. 3C shows the results of the functional assay of the polypeptides s4-1 BBL and 54-1BBL-Tri_{XVIII}^{LL} using Ctrl reporter and 4-1 BB reporter cells. Results are shown as “Fold induction” of NF-κB-dependent eCFP expression, normalized to stimulation with TCS-Ctrl.

[0063] FIG. 4A shows the graphical representation of the polypeptides s4-1BBL-Tri_{XVIII}^{LL}, s4-1BBL-Tri_{XVIII} and s4-1 BBL-Tri_{XV}. FIG. 4B shows the results of the binding assay of the polypeptides s4-1BBL-Tri_{XVIII}^{LL}, s4-1BBL-Tri_{XVIII} and s4-1 BBL-Tri_{XV} to Ctrl reporter and 4-1 BB reporter cells as histograms or bar charts. FIG. 4C shows the results of the functional assay of the polypeptides s4-1BBL-Tri_{XVIII}^{LL}, s4-1BBL-Tri_{XVIII} and s4-1 BBL-Tri_{XV} using Ctrl reporter and 4-1BB reporter cells. Results are shown as “Fold induction” of NF-κB-dependent eCFP expression, normalized to stimulation with TCS-Ctrl.

[0064] FIG. 5A shows the graphical representation of the polypeptides s4-1BBL-Tri_{XVIII}^{LL}, Triple-s4-1BBL and Triple-s4-1BBL-Tri_{XVIII}^{LL}. FIG. 5B shows the results of the binding assay of the polypeptides s4-1BBL-Tri_{XVIII}^{LL}, Triple-s4-1BBL and Triple-s4-1BBL-Tri_{XVIII}^{LL} to Ctrl reporter and 4-1BB reporter cells as histograms, bar chart or line plot. FIG. 5C shows the results of the functional assay of the polypeptides s4-1BBL-Tri_{XVIII}^{LL}, Triple-s4-1BBL and Triple-54-1BBL-Tri_{XVIII}^{LL} using Ctrl reporter and 4-1BB reporter cells. Results are shown as “Fold induction” of NF-κB-dependent eCFP expression, normalized to stimulation with TCS-Ctrl.

[0065] FIG. 6A shows the graphical representation of the polypeptides s4-1BBL-Tri_{XVIII}^{LL} and s4-1BBL-TNC. FIG. 6B shows the results of the binding assay of the polypeptides s4-1BBL-Tri_{XVIII}^{LL} and s4-1BBL-TNC to Ctrl reporter and 4-1BB reporter cells as histograms, bar chart or line plot FIG. 6C shows the results of the functional assay of the polypeptides s4-1BBL-Tri_{XVIII}^{LL} and s4-1BBL-TNC using Ctrl reporter and 4-1 BB reporter cells. Results are shown as “Fold induction” of NF-κB-dependent eCFP expression, normalized to stimulation with TCS-Ctrl.

[0066] FIG. 7 shows a graphical representation of the possible positioning of a functional polypeptide of the present disclosure in a measles vector of the Schwarz strain.

[0067] FIG. 8A shows the graphical representation of the polypeptides 54-1BBL-Tri_{XVIII} and 4-1BBL-Tri_{XVIII}^{LL} in a measles virus expression vector of the Schwarz strain. FIG. 8B shows the analysis of Jurkat human 4-1BB reporter cells and T cell stimulator cells (TCS) control cells and TCS expressing human 4-1BBL. FIGS. 8C and D show the results of the functional assay of cells infected with the oncolytic viruses MV-A and MV-B encoding 54-1BBL-Tri_{XVIII} and 4-1BBL-Tri_{XVIII}^{LL}, respectively. TCS expressing 4-1BBL as well as MAb-2 (1 μg/ml) in combination with TCS ctrl served as positive control for 4-1BB activation.

[0068] FIG. 9A shows the schematic representation of the gating strategy of one representative experiment. FIG. 9B shows T-cell proliferation in PBMCs obtained from six healthy individuals. The figure shows percentages of CFSE_{low} gated on live CD4 or CD8 T cells normalized to anti-human CD3 (OKT3) alone. FIG. 9C shows histograms for activation marker CD25 of one representative experiment. CD25 expression is analyzed by gating on live CD4 and CD8 T cells. FIG. 9D shows T-cell activation by analysing geometric mean of fluorescence intensity (gMFI) of CD25 for 6 healthy volunteers for the CD4 and CD8 T cell subsets. Data is normalized to data obtained with anti-human CD3 (OKT3) alone.

[0069] FIG. 10 shows the analysis of cytokine production in PBMC cultures stimulated with anti-CD3 antibody and 54-1BBL-Tri_{XVIII}. FIG. 10A shows the results of a Luminex multiplex analysis of the supernatants of PBMCs cocultures. A summary of the measured cytokines of 6 healthy volunteers are depicted for IFN-γ, GMCSF, IL-13, and TNF-α. FIG. 10B shows the data as FIG. 10A normalized to OKT3 stimulation.

[0070] FIG. 11 shows the assessment of two anti-CD3 antibodies (OKT3 (FIG. 11A) and UCHT1 (FIG. 11B). The T-cell proliferation (percentage of CFSE-low CD4 and CD8 T cell subsets) in PBMCs of one healthy donor in triplicates is shown.

[0071] FIG. 12 shows the influence of 54-1BBL-Tri_{XVIII} on T cell activation and proliferation in cocultures of PBMCs with human anti-CD3 (UCHT1). FIG. 12A shows the T-cell proliferation in PBMCs obtained from 6 healthy volunteers is depicted. The figure shows percentages of CFSE^{low} gated on live CD4 or CD8 T cells normalized to anti-human CD3 (UCHT1) alone. FIG. 12B shows T-cell activation by analyzing geometric mean of fluorescence intensity (gMFI) of CD25 is shown for 5 healthy volunteers for the CD4 and CD8 T cell subsets. Data is normalized to data obtained with anti-human CD3 (UCHT1) alone. For statistical evaluation, one-way ANOVA followed by Krustal-Wallis test was performed (* indicates p<0.05; ** indicates p<0.01).

[0072] FIG. 13 shows the influence of purified s4-1BBL-Tri_{XVIII} on T-cell activation and proliferation in a coculture of PBMCs with human anti-CD3 (UCHT1). FIG. 13A shows T-cell proliferation in PBMCs obtained from 5 healthy volunteers. The shown percentages of CFSE^{low} are gated on live CD4 or CD8 T cells normalized to anti-human CD3 (UCHT1) alone. FIG. 13B shows T-cell activation by analyzing geometric mean of fluorescence intensity (gMFI) of CD25 for 5 healthy volunteers for the CD4 and CD8 T subsets and NK cells. Data is normalized to data obtained with anti-human CD3 (UCHT1) alone. For statistical evaluation, one-way ANOVA followed by Krustal-Wallis test was performed (* indicates p<0.05; ** indicates p<0.01).

[0073] FIG. 14A shows the graphical representation of the polypeptides s4-1 BBLsh-Tri_{XVIII} and s4-1BBL-Tri_{XVIII}. FIG. 14B shows the analysis of Jurkat 4-1 BB reporter cells and T cell stimulator cells (TCS). FIG. 14C shows Control (Ctrl) reporter cells and 4-1BB reporter cells probed with undiluted and diluted supernatants derived from HEK293T cells transfected with expression constructs encoding s4-1BBL-Tri_{XVIII} (left) and s4-1BBLsh-Tri_{XVIII} (right). Bound s4-1BBL-Tri_{XVIII} and 54-1BBLsh-Tri_{XVIII} was detected using a biotinylated Strep-tag II antibody in conjunction with SA-PE. FIG. 14D shows the data of FIG. 14C depicted as bar diagram (left) and line diagram (right). Data are normalized to binding to control cells. STD of duplicate measurements are shown. FIG. 14E shows the stimulation of control reporter cells and 4-1BB reporter cells with TCS alone or with TCS in presence of MAb-2 or cell culture supernatants containing s4-1BBL-Tri_{XVIII} or s4-1BBLsh-Tri_{XVIII} used at indicated dilutions. TCS expressing 4-1BBL served as additional positive control for 4-1BB activation. Experiments were performed in triplicates and eCFP expression was measured via flow cytometry and results are shown in as fold induction (gMFI of stimulated cells/gMFI of control-stimulated cells). Control stimulation is also displayed as a dotted line.

[0074] FIG. 15A shows the graphical representation of the polypeptides s4-1 BBL-Tri_{XVIII} with the depiction of different constructs having a different 4-1BBL length. FIG. 15B shows the analysis of Jurkat 4-1BB reporter cells and T cell stimulator cells (TCS). FIG. 15C shows the results of the functional assay using the different s4-1 BBLsh-Tri_{XVIII} length supernatants on 4-1BB expressing reporter cells.

[0075] FIG. 16A shows the graphical representation of the polypeptide ms4-1BBL-Tri_{XVIII} (SEQ ID NO: 140). FIG. 16B shows the analysis of Jurkat 4-1BB reporter cells and T cell stimulator cells (TCS). FIG. 16C shows results of the flow cytometry binding study. FIG. 16D and FIG. 16E show the results of the functional assay of the murine ms4-1BBL-Tri_{XVIII} (SEQ ID NO: 140) using Ctrl reporter and 4-1BB reporter cells. Results are shown as “Fold induction” of NF-κB-dependent eCFP expression, normalized to stimulation with TCS-Ctrl. FIG. 16F shows the graphical representation of the polypeptide ms4-1BBL-Tri_{XVIII} in a measles virus expression vector of the Schwarz strain. FIG. 16G shows the results of the functional assay of the ms4-1BBL-Tri_{XVIII} derived from MV-C measles virus infected Vero cells using Ctrl reporter and 4-1BB reporter cells. Results are shown as “Fold induction” of NF-κB-dependent eCFP expression, normalized to stimulation with TCS-Ctrl.

[0076] FIG. 17 shows the average tumor volume over the time after cell implantation of mice intratumorally injected with oncolytic viruses MV-B (encoding s4-1BBL-Tri_{XVIII}) and MV-control in comparison to the vehicle vector.

### BRIEF DESCRIPTION OF SEQUENCES

| SEQ ID NO | Description |
|---|---|
| 1 | Minimal sequence of TNF homology domain (AA 90 to 242 of |
| | wild-type 4-1BBL) |
| 2 | Reference sequence of wild-type 4-1BBL (AA 1 to 254) |
| 3 | 4-1BBL ectodomain polypeptide without cysteine (AA 52 to 254 |
| | of wild-type 4-1BBL) |
| 4 | 4-1BBL ectodomain polypeptide (AA 85 to 254 of wild-type 4-1BBL) |
| 5 | 4-1BBL ectodomain polypeptide (AA 52 to 242 of wild-type 4-1BBL) |
| 6 | 4-1BBL ectodomain polypeptide (AA 85 to 242 of wild-type 4-1BBL) |
| 7 | Trimerization domain XVIII |
| 8 | Trimerization domain XV |
| 9 | Linker 1 |
| 10 | Linker 2 (Linker 1 + Tri-Linker) |
| 11 | Linker 3 15mer linker for triple polypeptides |
| 12 | Linker 4 as quadruple sequence, may be used at a variable |
| | number of GS dimer |
| 13 | Linker 5 18mer |
| 14 | Linker 6 14mer |
| 15 | Linker 7 |
| 16 | Linker 8 |
| 17 | CD5 leader sequence |
| 18 | Strep tag |
| 19 | Hexa-HIS TAG |
| 20 | s4-1BBL MV(Schwarz)-CMV(1) vector |
| 21 | s4-1BBL in pCEP4 |
| 22 | s4-1BBL in MV(Rubeovax)-CMV(1) vector |
| 23 | s4-1BBL in pAV(adenovirus)-CMV vector |
| 24 | s4-1BBL-Tri_{XV} in MV(Schwarz)-CMV(1) vector |
| 25 | s4-1BBL-Tri_{XV} in pCEP4 vector |
| 26 | s4-1BBL-Tri_{XV} in MV(Rubeovax)-CMV(1) vector |
| 27 | s4-1BBL-Tri_{XV} in pAV-CMV vector |
| 28 | s4-1BBL-Tri_{XVIII} in MV(Schwarz)-CMV(1) vector |
| 29 | s4-1BBL-Tri_{XVIII}^{LL} in MV(Schwarz)-CMV(1) vector |
| 30 | s4-1BBL-Tri_{XVIII} in pCEP4 vector |
| 31 | s4-1BBL-Tri_{XVIII} in MV(Rubeovax)-CMV(1) vector |
| 32 | s4-1BBL-Tri_{XVIII}^{LL} in MV(Rubeovax)-CMV(1) vector |
| 33 | s4-1BBL-Tri_{XVIII} in pAV-CMV vector |
| 34 | Triple s4-1BBL in MV(Schwarz)-CMV(1) vector |
| 35 | s4-1BBL-Tri_{XVIII}^{LL} in pCEP4 vector |
| 36 | Triple s4-1BBL in pCEP4 vector |
| 37 | Triple s4-1BBL in MV(Rubeovax)-CMV(1) vector |
| 38 | Triple s4-1BBL in pAV-CMV vector |
| 39 | Triple s4-1BBL-Tri_{XVIII} in MV(Schwarz)-CMV(1) vector |
| 40 | Triple s4-1BBL-Tri_{XVIII}^{LL} in MV(Schwarz)-CMV(1) vector |
| 41 | Triple s4-1BBL- Tri_{XVIII} in pCEP4 vector |
| 42 | Triple s4-1BBL-Tri_{XVIII}^{LL} in pCEP4 vector |
| 43 | Triple-s4-1BBL-Tri_{XVIII} in MV(Rubeovax)-CMV(1) vector |
| 44 | Triple-s4-1BBL-Tri_{XVIII}^{LL} in MV(Rubeovax)-CMV(1) vector |
| 45 | Triple-s4-1BBL-Tri_{XVIII} in pAV-CMV vector |
| 46 | Triple-s4-1BBL-Tri_{XVIII}^{LL} in pAV-CMV vector |
| 47 | s4-1BBL; without tags (DNA) |
| 48 | s4-1BBL; without tags; protein (PROT) |
| 49 | s4-1BBL; with tags (DNA) |
| 50 | s4-1BBL; with tags (PROT) |
| 51 | s4-1BBL-Tri_{XV}; without tags (DNA) |
| 52 | s4-1BBL-Tri_{XV}; without tags (PROT) |
| 53 | s4-1BBL-Tri_{XV}; with tags (DNA) |
| 54 | s4-1BBL-Tri_{XV}; with tags (PROT) |
| 55 | s4-1BBL-Tri_{XVIII}; with tags (DNA) |
| 56 | s4-1BBL-Tri_{XVIII}; with tags (PROT) |
| 57 | s4-1BBL-Tri_{XVIII}; without tags (DNA) |
| 58 | s4-1BBL-Tri_{XVIII}; without tags (PROT) |
| 59 | s4-1BBL-Tri_{XVIII}^{LL}; without tags (DNA) |
| 60 | s4-1BBL-Tri_{XVIII}^{LL}; without tags (PROT) |
| 61 | Triple-s4-1BBL; without tags (DNA) |
| 62 | Triple-s4-1BBL; without tags (PROT) |
| 63 | Triple-s4-1BBL; with tags (DNA) |
| 64 | Triple-s4-1BBL; with tags (PROT) |
| 65 | Triple-s4-1BBL-Tri_{XVIII}; without tags (DNA) |
| 66 | Triple-s4-1BBL-Tri_{XVIII}; without tags (PROT) |
| 67 | Triple-s4-1BBL-Tri_{XVIII}^{LL}; without tags (DNA) |
| 68 | Triple-s4-1BBL-Tri_{XVIII}^{LL}; without tags (PROT) |
| 69 | Triple-s4-1BBL-Tri_{XVIII}^{LL}; with tags (DNA) |
| 70 | Triple-s4-1BBL-Tri_{XVIII}^{LL}; with tags (PROT) |
| 71 | Triple-s4-1BBL-Tri_{XVIII}; with tags (DNA) |
| 72 | s4-1BBL-Tri_{XVIII}^{LL}; with tags; with Linker 8 (PROT) |
| 73 | s4-1BBL-Tri_{XVIII}^{LL}; with tags; with Linker 8 (DNA) |
| 74 | Triple-s4-1BBL-Tri_{XVIII}^{LL}; with tags; with Linker 7 (PROT) |
| 75 | Triple-s4-1BBL-Tri_{XVIII}^{LL}; with tags; with Linker 7 (DNA) |
| 76 | s4-1BBLsh-Tri_{XVIII}; with tags (PROT) |
| 77 | s4-1BBLsh-Tri_{XVIII}; with tags (DNA) |
| 78 | Triple-s4-1BBL-Tri_{XVIII}; with tags; with Linker 1 (PROT) |
| 79 | Triple-s4-1BBL-Tri_{XVIII}; with tags; with Linker 1 (DNA) |
| 80 | Kozak sequence (n can be any base and depicts the generic |
| | gene downstream of the prototypic Kozak sequence) |
| 81 | Hammerhead ribozyme sequence |
| 82 | s4-1BBL TNC in MV(Schwarz)-CMV(1) vector |
| 83 | s4-1BBL TNC in pCEP4 vector |
| 84 | s4-1BBL-TNC in MV(Rubeovax)-CMV(1) vector |
| 85 | s4-1BBL-TNC in pAV-CMV vector |
| 86 | s4-1BBL-TNC with tags (PROT) |
| 87 | MAb1 scFv without tags (PROT) |
| 88 | MAb1-scFv; without tags (DNA) |
| 89 | MAb2-scFv-Tri_{XVIII}; without tags (PROT) |
| 90 | MAb2-scFv-Tri_{XVIII}; without tags(DNA) |
| 91 | Signal peptide derived from the human Igk light chain |
| 92 | Complementarity-defining region (CDR) VH of MAb1 |
| 93 | CDR VL region of MAb1 |
| 94 | Primer MAb1-F-HindIII |
| 95 | Primer MAb1-B1 |
| 96 | Primer B2-NotI |
| 97 | Primer MAb1-B |
| 98 | Primer MAb1-Tri-F |
| 99 | Primer TriDom-B-BamHI |
| 100 | CDR VH of MAb2 |
| 101 | CDR VL region of MAb2 |
| 102 | Primer Tag-4-1BBL-F1 |
| 103 | Primer 4-1BB-L-B-NotI |
| 104 | Primer CD5L-Tags-F2-HindIII |
| 105 | Primer Tags-TriDom-F1 |
| 106 | Primer TriDom-4-1BB-L-B |
| 107 | Primer TriDom-4-1BB-L-F |
| 108 | Primer Triple-s4-1BBL-F-HindIII |
| 109 | Primer Triple-s4-1BBL-B-NotI |
| 110 | Chicken tenascin-C (AA 110 to 139) |
| 111 | Primer Tags-TNC-B |
| 112 | Primer Tags-TNC-F |
| 113 | Primer MAb2-F-HindIII |
| 114 | Primer MAb2-B-BamHI |
| 115 | s4-1BBL-Tri_{XVIII}^{LL} pAV-CMV |
| 116 | s4-1BBLsh (short)-Tri_{XVIII} in MV(Schwarz)-CMV(1) vector |
| 117 | s4-1BBLsh-Tri_{XVIII} in pCEP4 vector |
| 118 | S4-1BBLsh-Tri_{XVIII} in MV(Rubeovax)-CMV(1) vector |
| 119 | S4-1BBLsh-Tri_{XVIII} in pAV-CMV vector |
| 120 | Primer CD5Leader-F_HindIII |
| 121 | Primer 4-1BBLsh-TriXVIII-B |
| 122 | Primer TriXVIII-41BBLsh-F |
| 123 | Primer 4-1BBLsh-B_NotI |
| 124 | MV-A |
| 125 | MV-B |
| 126 | Primer CD5Leader-F_HindIII |
| 127 | Primer 41BBL(241)_NotI_B |
| 128 | Primer 41BBLsh(90-240)_B_Not |
| 129 | Primer 41BBLsh(90-239)_B_Not |
| 130 | Primer 41BBLsh(90-238)_B_Not |
| 131 | Primer 41BBLsh(90-237)_B_Not |
| 132 | Primer 41BBL(235)_NotI_B |
| 133 | Primer 41BBLsh(91)-TriXVIII-B |
| 134 | Primer TriXVIII-41BBLsh(91)-F |
| 135 | Primer 41BBLsh-B NotI |
| 136 | Primer m41BBLex-F_BamHI |
| 137 | Primer m4-1BBL-B-NotI |
| 138 | MV-control |
| 139 | MV-C |
| 140 | murine (m)s4-1BBL-Tri_{XVIII} (ms4-1BBL-Tri_{XVIII}) |
| 141 | Codon optimized s4-1BBL-Tri_{XVIII} (e.g., insert of MV-B) |
| 142 | DNA s4-1BBLsh₉₀₋₂₄₁-Tri_{XVIII} |
| 143 | DNA s4-1BBLsh₉₀₋₂₄₀-Tri_{XVIII} |
| 144 | DNA s4-1BBLsh₉₀₋₂₃₉-Tri_{XVIII} |
| 145 | DNA s4-1BBLsh₉₀₋₂₃₈-Tri_{XVIII} |
| 146 | DNA s4-1BBLsh₉₀₋₂₃₇-Tri_{XVIII} |
| 147 | DNA s4-1BBLsh₉₀₋₂₃₅-Tri_{XVIII} |
| 148 | DNA s4-1BBLsh₉₁₋₂₄₂-Tri_{XVIII} |
| 149 | Protein s4-1BBLsh90-241 |
| 150 | Protein s4-1BBLsh90-240 |
| 151 | Protein s4-1BBLsh90-239 |
| 152 | Protein s4-1BBLsh90-238 |
| 153 | Protein s4-1BBLsh90-237 |
| 154 | Protein s4-1BBLsh90-235 |
| 155 | Protein s4-1BBLsh91-242 |

### Definitions

[0078] Unless defined otherwise, technical and scientific terms used herein have the same meaning as commonly understood by one of ordinary skill in the art to which this invention belongs.

[0079] As used in the context of the present application, the term “about” means+/−10% of the recited value, preferably +/−5% of the recited value. For example, about 100 nucleotides (nt) shall be understood as a value between 90 and 110 nt, preferably between 95 and 105 nt.

[0080] An “antibody” or “immunoglobulin” (Ig) as used herein refers to a polypeptide molecule including naturally occurring immunoglobulins, monoclonal antibodies including murine, human, humanized and chimeric monoclonal antibodies, antibody fragments, bispecific or multispecific antibodies, dimeric, tetrameric or multimeric antibodies, single chain antibodies, single domain antibodies, antibody mimetics and any other modified configuration of the immunoglobulin molecule that comprises an antigen binding site of the required specificity. An “antibody” usually comprises two heavy chains and two light chains connected by disulphide bonds, as well as any multimer thereof (e.g. IgM). Each heavy chain comprises a heavy chain variable region (VH) and a heavy chain constant region (comprising the domains CH1, hinge, CH2 and CH3 as well as CH4 for IgM and IgE). Each light chain usually comprises of a light chain variable region (VL) and a light chain constant region (CL). The VH and the VL regions may be further subdivided into regions of hypervariability, termed “complementarity determining regions” (CDR), interspersed with framework regions (FR). These CDRs represent the actual target or antigen-binding site of an antibody. Each VH and VL is composed of three CDRs and four FR segments, arranged from amino-to-carboxyl-terminus in the following order: FR1, CDR1, FR2, CDR2, FR3, CDR3 and FR4. Immunoglobulins are usually assigned to five major classes, namely IgA, IgD, IgE, IgG and IgM, wherein the categorization depends on the heavy chain constant region architecture of an immunoglobulin. IgA and IgG are further sub-classified as the isotypes IgA1, IgA2, IgG1, IgG2, IgG3 and IgG4. Regarding the light chains of an antibody or immunoglobulin, there are usually two types, namely kappa (K) and lambda (l), again based on the architecture of the constant regions.

[0081] An “aptamer” as used herein refers to an oligonucleotide (RNA and/or DNA) or peptide molecule that binds to a specific target molecule. Aptamers can include naturally occurring or synthetic nucleotides and/or amino acids, or at least one nucleotide or amino acid position, or the linkage between two nucleotides or amino acids, may be synthetically modified, for example, a nucleic acid analogues.

[0082] A “checkpoint inhibitor” is a biological molecule or a chemical substance that blocks proteins called “checkpoints” or “immune checkpoints” (ICPs) that are expressed by some types of immune system cells, such as T-cells, and particularly by some cancer cells. These checkpoints help keep immune responses from being too strong and sometimes can keep T-cells from killing cancer cells. When these checkpoints are blocked, T-cells can more effectively kill cancer cells. Examples of checkpoint proteins found on T cells or cancer cells include, for example, PD-1, PD-L1, and CTLA-4. “Immune checkpoint inhibitors” may thus be used, usually together with other compositions or compounds, to treat cancer.

[0083] The term “cold tumor” or “non-inflamed tumor” as used herein refers to tumor or tumor tissue generally characterized by a lack of infiltrating T-cells. This lack of infiltrating T-cells can be due to the lack of tumor antigens, APC deficits, or the absence of T cell priming/activation and impaired trafficking of T-cells to the tumor mass (cf. Bonaventura et al., Frontiers in Immunology, vol. 10, 2019). In contrast, a “hot tumor” is usually characterized by a “T-cell inflamed” phenotype. Cancer immunotherapy aims at breaking the impaired T-cell infiltration in cold tumors to make the tumor tissue accessible for T-cells of the immune system.

[0084] A “genome” as used herein is to be understood broadly and comprises any kind of genetic information (RNA/DNA) inside any compartment of a living cell. In the context of a “genome modification”, the term thus also includes artificially introduced genetic material, which may be transcribed and/or translated, inside a living cell, for example, an episomal plasmid or vector, or an artificial DNA integrated into a naturally occurring genome.

[0085] The term “costimulatory” in context of the present invention means that certain immune cells, such as B-lymphocytes and T-lymphocytes require a second signal to be fully activated. This is for example the case for naïve CD8⁺ T-lymphocytes. The primary stimulus is the binding of the MHC class I on the surface of antigen-presenting cells to the T-cell receptor. Without a second signal, the cell is not being optimally activated. A second stimulus is required, such as the binding of 4-1BB on the surface of antigen-presenting cells to 4-1BBL on the surface of activated T-cells. After full activation by binding of 4-1BB to 4-1BBL, T-cell proliferation, IL-2 secretion and cytolytic activity is enhanced.

[0086] A “linker” in terms of the present invention is a sequence of a polypeptide, which separates two functional domains of a polypeptide spatially by forming a defined secondary structure allowing flexibility and/or spacing of the domains separated and thus full functionality if the domains such separated. The general properties of linkers are usually classified into three categories according to their structures: flexible linkers, rigid linkers, and in vivo cleavable linkers (Chen et al., Adv. Drug. Deliv. Rev., 2013, 65(10), 1357-1369). All of these linkers may be used according to the disclosure presented herein, alone, or in combination. Typical linker sequences can form different secondary structures such as loops, helices and linear structures.

[0087] A linker sequence can be present anywhere in a multidomain polypeptide, preferably to separate individual functional domain. Linker sequences can be especially present between subunits of a protein, or between two domains of a multidomain protein, or between a functional element and a protein element before or after tag sequences. It is well known in the art, that different linkers can be present and how a linker has to be designed to fulfill its purpose. Several linkers and the use thereof in the polypeptides of the present invention are provided below. Further linkers are available to the skilled person and can be used according to the present disclosure.

[0088] The term “oncolytic virus” or “OV” as used herein refers to a naturally occurring or an engineered virus, which can be used in cancer therapy. An OV usually has engineered and/or intrinsic tropism for cancer cells, e.g. by using cancer-cell proteins as receptor, and/or possesses preferential replication in cancer cells. Besides, causing the death of virus-infected cancer cells, the intratumoral (IT) infection can also boost the anticancer immune response, leading to immune destruction of uninfected cancer cells. OVs may be engineered to comprise sequences encoding additional “payloads”. These “payloads” are molecules expressed by the OV that additionally favour an anti-tumor response, by co-stimulation of T-cells, or by reducing undesired responses, or by breaking checkpoints etc. An OV may also be a chimera, i.e. the OV is encoded by a nucleic acid molecule of at least two different biological origins, and/or the OV combines naturally occurring and artificial elements. A “chimeric virus” or “chimera” OV may thus refer to at least one virus particle originating from at least two nucleic acid molecules of different organisms/viruses, or from a recombinant (artificial) molecule. Further, virus particles, including OVs, may also optionally comprise host cell derived material (e.g. a host cell derived lipid bilayer), which the virus incorporates during processing and particle formation within the host cell after replication of its genome.

[0089] The term “operatively linked/connected”, “operably linked/connected”, or “functionally linked/connected” specifically in the context of nucleic acids, for example plasmids or expression vectors, or an OV as a vector, means that one element, for example, a regulatory element, or a first protein-encoding sequence, is linked in such a way with a further part so that the protein-encoding nucleotide sequence, i.e., is positioned in such a way relative to the protein-encoding nucleotide sequence on, for example, a nucleic acid molecule that an expression of the protein-encoding nucleotide sequence under the control of the regulatory element can take place in a living cell.

[0090] The term “payload” in terms of the present invention means the delivery of accessory sequences to be expressed in a tumor cell by an oncolytic virus. These sequences encode immune stimulatory, cytotoxic or replication blocking agents, which act as an additional effector molecule besides the virus induced lysis of tumor cells.

[0091] The terms “protein” and “polypeptide” are used interchangeably herein for amino acid sequences encoding a functional protein or enzyme, or a functional fragment thereof. The term “peptide” as used herein refers to shorter polypeptide sequences of usually below about 100 amino acids in length.

[0092] As used herein, a “regulatory sequence”, or “regulatory element” refers to nucleotide sequences which are not part of an RNA/protein-encoding nucleotide sequence, but which mediate the expression of the RNA/protein-encoding nucleotide sequence. Regulatory elements include, for example, promoters, cis-regulatory elements, enhancers, introns or terminators. Depending on the type of regulatory element it is located on the nucleic acid molecule before (i.e., 5′ of) or after (i.e., 3′ of) the protein-encoding nucleotide sequence. Regulatory elements are functional in a living cell.

[0093] A “single-chain antibody” (scAb) or “single-chain Fv fragment” (scFv) as used herein refers to a polypeptide molecule modified by means of genetic engineering, which contains the variable light chain region and the variable heavy chain region of an antibody molecule, usually connected by a suitable peptide linker.

[0094] The term “tag” or “protein tag” refers to a variety of different polypeptide sequences or the corresponding nucleic acid sequences encoding the same, which can be incorporated into a protein of interest at various positions, preferably at the N- and/or C-terminus, or between distinct functional domains, and fulfil several different functions. Protein tags can, for example, be differentiated into affinity tags such as chitin binding protein (CBP), maltose binding protein (MBP), Strep-tag and glutathione-S-transferase (GST) or His-Tag. Affinity tags can be used for specifically purifying the protein of interest. Another example of protein tags are solubilization tags, which allow to obtain the protein of interest in its soluble form especially in bacterial cell culture. Epitope tags can be used for having a binding site for analytically antibodies and fluorescence tags offer the possibility to detect the protein of interest in the cell culture.

[0095] The term “treat” or “treatment” means to administer a therapeutic agent, such as a composition containing any of the polypeptides or oncolytic viruses of the present invention, internally or externally to a subject or patient having one or more disease symptoms, or being suspected of having a disease, for which the agent has therapeutic activity. Typically, the agent is administered in an amount effective to alleviate one or more disease symptoms in the treated subject or population, whether by inducing the regression of or inhibiting, delaying or slowing the progression of such symptom(s) by any clinically measurable degree. The amount of a therapeutic agent that is effective to alleviate any particular disease symptom may vary according to factors such as the disease state, age, and weight of the patient, and the ability of the drug to elicit a desired response in the subject. Whether a disease symptom has been alleviated can be assessed by any clinical measurement typically used by physicians or other skilled healthcare providers to assess the severity or progression status of that symptom. The term further includes a postponement of development of the symptoms associated with a disorder and/or a reduction in the severity of the symptoms of such disorder. The terms further include ameliorating existing uncontrolled or unwanted symptoms, preventing additional symptoms, and ameliorating or preventing the underlying causes of such symptoms. Thus, the terms denote that a beneficial result has been conferred on a vertebrate subject with a disorder, disease or symptom, or with the potential to develop such a disorder, disease or symptom.

[0096] The term “trimerizable” in context of the present invention means the ability of a molecule to form a complex structure of three sub structures. More specific, in the field of polypeptides, the term trimerizable means the ability of a polypeptide monomer to form a structure complex together with two similar or identical other monomers resulting in a trimer.

[0097] As used herein, “upstream” indicates a location on a nucleic acid molecule, which is nearer to the 5′ end of said nucleic acid molecule. Likewise, the term “downstream” refers to a location on a nucleic acid molecule which is nearer to the 3′ end of said nucleic acid molecule. For avoidance of doubt, nucleic acid molecules and their sequences are typically represented in their 5′ to 3′ direction (left to right).

[0098] The terms “vector”, or “plasmid (vector)” refer to a molecule that can replicate in a cell independently from a chromosome, including but not limited to plasmids or (plasmid) vectors, viruses, cosmids, artificial yeast- or bacterial artificial chromosomes (YACs and BACs), phagemids, and bacterial phage-based vectors. Vectors may comprise, inter alia, an expression cassette, isolated single-stranded or double-stranded nucleic acid sequences, comprising sequences in linear or circular form that encode amino acid sequences, viruses, viral replicons including modified viruses, and combinations or s mixtures thereof, for introduction or transformation, transfection or transduction into any eukaryotic cell, including any kind of eukaryotic cell, tissue, organ or material according to the present disclosure. A “nucleic acid vector”, for instance, is a DNA or RNA molecule, which is used to deliver foreign genetic material to a cell, where it can be transcribed and optionally translated, such as a plasmid or expression vector. Preferably, the vector is a plasmid comprising multiple cloning sites. The vector may further comprise a “unique cloning site” a cloning site that occurs only once in the vector and allows insertion of DNA sequences, e.g. a nucleic acid cassette or components thereof, by use of specific restriction enzymes. A “flexible insertion site” may be a multiple cloning site, which allows insertion of the components of the nucleic acid cassette according to the invention in an arrangement, which facilitates simultaneous transcription of the components and allows activation of the RNA activation unit. An “Additional Transcription Unit” or “ATU” is an example for a flexible insertion site. An ATU may usually comprise three potential regions of inserting a nucleic acid and further comprise, for use in steps of cloning into cDNA of MV, cis-acting sequences necessary for MV-dependent expression of a recombinant transgene, such as a promoter preceding a gene of interest, into the nucleic acid molecule encoding an oncolytic virus, for example, a measles virus (MV). The ATU may serve the function of a multiple cloning site. More than one ATU may be present. An ATU must guarantee that the normal replicative functions of an oncolytic virus of interest are not interrupted. For MV, an ATU may be located in the N-terminal sequence of the cDNA molecule encoding the full-length (+)RNA strand of the antigenome of the MV, for example before the N gene (ATU1), and, for the purpose of the present disclosure, it is preferably located between the P and M genes of this virus (ATU2). Alternatively, it can be located between the H and L genes (ATU3).

[0099] The term “rescue” describes procedures that are necessary to construct and isolate recombinant viruses, which have an altered genome compared to the original virus strain. These procedures can be very different for different virus types and are known to persons skilled in the art.

[0100] Whenever the present disclosure relates to the percentage of the homology or identity of nucleic acid or amino acid sequences, this identity is determined by a comparison of a sequence of interest, the reference sequence (e.g., a SEQ ID NO as disclosed herein), to another sequence, the query sequence, over the entire length of the reference sequence. Identity or homology is obtained by using the EMBOSS Water Pairwise Sequence Alignments (nucleotide) programme (www.ebi.ac.uk/Tools/psa/emboss_water/nucleotide.html) nucleic acids or the EMBOSS Water Pairwise Sequence Alignments (protein) programme (www.ebtac.uk/Tools/psa/emboss_water/) for amino acid sequences. Those tools provided by the European Molecular Biology Laboratory (EMBL) European Bioinformatics Institute (EBI) for to local sequence alignments use a modified Smith-Waterman algorithm (see www.ebi.ac.uk/Tools/psa/and Smith, T. F. & Waterman, M. S. “Identification of common molecular subsequences” Journal of Molecular Biology, 1981 147 (1):195-197). When conducting an alignment, the default parameters defined by the EMBL-EBI are used. Those parameters are (i) for amino acid sequences: Matrix=BLOSUM62, gap open penalty=10 and gap extend penalty=0.5 or (ii) for nucleic acid sequences: Matrix=DNAfull, gap open penalty=10 and gap extend penalty=0.5.

### DETAILED DESCRIPTION

[0101] 4-1BB is a highly important target for new forms of immuno-stimulatory therapy. Nevertheless, working with polypeptides as reported in the state of the art, such as 4-1BB targeting scFvs and agonistic antibodies—presently representing the standard agents to modulate 4-1BB signaling—have been reported to result in side effects and undesired systemic immune system activation. Additionally, several artificial polypeptides for 4-1BB targeting and signaling modulation have been created, still these polypeptides may be of particular interest for experimental settings only, as the components of non-human origin may hamper therapeutic applications in a patient.

[0102] So far, no attempts have been made to specifically work with artificial polypeptides mimicking the fully natural ligand 4-1BBL of 4-1BB, which represents an immunologically favorable strategy as no sequences recognized as “foreign” by the human immune system have to be used. Further, the present invention provides systematic studies to define the minimum functionally active s4-1BBL domain to provide a small and versatile biological ligand particularly suitable for use in combination with, for example, an oncolytic virus, and optionally as combination drug to be administered with at least one further pharmaceutically active ingredient useful in the prophylaxis and/or treatment of cancer, to achieve significant therapeutic advantages, particularly for providing treatment strategies for those cancer/tumor indications, for which promising (alleviating or curative) treatment strategies are presently not yet available.

[0103] To address the needs to provide more specific and active 4-1 BB modulating agents, the present invention thus provides in a first aspect a costimulatory polypeptide, wherein the polypeptide may comprise (a) (i) at least one 4-1 BBL ectodomain and a trimerization domain, and/or (ii) at least one 4-1BBL ectodomain and at least one leader sequence, and optionally at least one affinity tag; wherein each 4-1 BBL ectodomain comprises or consists of the minimal TNF Homology Domain according to SEQ ID NO: 1, or a core minimal Tumor Necrosis Factor (TNF) Homology Domain according to any one of SEQ ID NOs: 149 to 155, or a sequence having at least 90%, 91%, 92%, 93%, 94%, 95%, 96%, 97%, 98% or 99% sequence identity to SEQ ID NO: 1, or 149 to 155, respectively, or a nucleic acid sequence encoding the polypeptide; and/or (b) at least three 4-1BBL ectodomains, and optionally comprising at least one trimerization domain, wherein each 4-1 BBL ectodomain comprises or consists of the minimal TNF Homology Domain according to SEQ ID NO: 1, or a core minimal Tumor Necrosis Factor (TNF) Homology Domain according to any one of SEQ ID NOs: 149 to 155, or a sequence having at least 90%, 91%, 92%, 93%, 94%, 95%, 96%, 97%, 98% or 99% sequence identity to SEQ ID NO: 1, or 149 to 155, respectively, or a nucleic acid sequence encoding the polypeptide; and wherein the 4-1BBL ectodomain does not comprise the cysteine residue at position 51 of the naturally occurring human 4-1BBL ectodomain as shown in SEQ ID NO: 2, or a nucleic acid sequence encoding the same; and wherein the polypeptide binds to 4-1BB on the surface of a 4-1BB expressing cell and thus triggers 4-1BB-mediated immune cell stimulation. In specific embodiments, the trimerization domain of any of the preceding costimulatory polypeptides is selected from SEQ ID NO: 7 or 8.

[0104] In a preferred embodiment, the at least one 4-1BBL ectodomain may consist of the minimal TNF Homology Domain according to SEQ ID NO: 1, or a sequence having at least 92%, 93%, 94%, 95%, 96%, 97%, 98% or 99% sequence identity to SEQ ID NO: 1, or a nucleic acid sequence encoding the polypeptide. In another embodiment, the at least one 4-1BBL ectodomain may consist of the minimal TNF Homology Domain according to SEQ ID NO: 1, or a sequence having at least 92%, 93%, 94%, 95%, 96%, 97%, 98% or 99% sequence identity to SEQ ID NO: 1, or a nucleic acid sequence encoding the polypeptide.

[0105] In another preferred aspect, the at least one 4-1 BBL ectodomain of the various aspects and embodiments of the present invention may consist of core s4-1 BBL sequences of the minimum TNF Homology Domain (SEQ ID NO: 1), which “core” or “core minimum” sequences/constructs have been optimized in length in a targeted way to even improve the versatility and therapeutic potential of the minimal constructs of SEQ ID NO: 1. Surprisingly, it could be shown that the core minimum constructs maintained functionality and are even more compact than the sequence of SEQ ID NO:1. These sequences include a core minimal Tumor Necrosis Factor (TNF) Homology Domain according to any one of SEQ ID NOs: 149 to 155, or a sequence having at least 90%, 91%, 92%, 93%, 94%, 95%, 96%, 97%, 98% or 99% sequence identity thereto, or any sequence encoding the same.

[0106] The core minimum sequences may be used according to all aspects and embodiments disclosed herein, alone or in combination.

[0107] In one embodiment, the sequences may be independently selected from any one of SEQ ID NOs: 149 to 155, or a sequence encoding the same, or an amino acid sequence having substantial identity of at least 92%, 93%, 94%, 95%, 96%, 97%, 98% or 99% sequence identity to any one of SEQ ID NOs: 149 to 155. In other embodiments, combinations or variants of the core TNF Homology Domain sequences may be used together with other core or minimum domains.

[0108] In one embodiment, a nucleic sequence encoding a minimum TNF Homology Domain sequence, or an even shorter core minimum s4-1BBL suitable as sequence encoding a costimulatory polypeptide according to the present invention, or suitable to be used according to the various aspects disclosed herein, e.g., as insert or payload for an oncolytic virus, may be independently selected from any one of SEQ ID NOs: 141 to 148, or a nucleic acid sequence having substantial identity of at least 70%, 71%, 72%, 73%, 74%, 75%, 76%, 77%, 78%, 79%, 80%, 81%, 82%, 83%, 84%, 85%, 86%, 87%, 88%, 89%, 90%, 91%, 92%, 93%, 94%, 95%, 96%, 97%, 98% or 99% sequence identity to any one of SEQ ID NOs: 141 to 148.

[0109] To this end, a series of structure-function analyses was performed to establish the new core or minimal constructs having a better therapeutic scope and potential. All constructs could be expressed in a functional way and these are suitable to be used as costimulatory peptide, as fusion construct and/or as part of an oncolytic virus presenting these sequences.

[0110] According to the various aspects of the present invention, a trimerization domain other than SEQ ID NO: 7 or 8, preferably a human or a humanized trimerization domain, may be used in the context of the 4-1BBL costimulatory polypeptides of the present invention.

[0111] Surprisingly, as further detailed in the below Examples, the inventors of the present invention could identify superior therapeutic potential for a s4-1BBL-TriXVIII construct regarding to effectiveness and reduced expected side effects in comparison to the use of antibodies as effectors known in the art.

[0112] As detailed above, trimerization is key for obtaining a functional 4-1BBL, as this central ligand functionally interacts with the trimeric 4-1BB in the trimeric state to mediate and initiate downstream signaling. The secretion and assembly of trimeric 4-1BBL ectodomain polypeptides (costimulatory polypeptides) of the present invention results in a superior functionality compared to the monomer secretion and, therefore, a higher order structure properly mimicking the endogenous 4-1BBL can be obtained with the soluble 4-1BBL ectodomain polypeptides of the present invention. Furthermore, an oncolytic virus expressing a secreted and still highly functional s4-1BBL could be designed, which paves the way to use the signaling properties for oncolytic virus therapy in targeted immunomodulation.

[0113] The polypeptides of the present invention have several functional domains, which are described in detail below:

[0114] Working with a minimal polypeptide of 4-1BBL, i.e., the s4-1BBL costimulatory polypeptide according to SEQ ID NO: 1 as disclosed herein, has several advantages over the polypeptides presently available. Full length natural 4-1BBL comprises a membrane anchor. When designing therapeutics based on the natural ligand, a membrane anchor may have several disadvantages. On the one hand, high expression rates may be impaired, and on the other hand T-cells may mainly be activated by cells that are lysed anyway when the ligand is encoded by OV. Finally, the s4-1BBL as used therapeutically will be fully active without the need of any domain or sequence in the polypeptide being of non-human origin and thus being a potential target of an undesired immune response.

[0115] Just recently, new structural insights of the 4-1 BB/4-1 BBL complex were elucidated showing the distinct binding and functional properties of this complex (Chin et al., Nature Communications, 2018, 9:4679).

[0116] In contrast to earlier structural studies, Chin et al. supra elucidated markedly different data on the structure of the naturally occurring 4-1 BBL homotrimer. This information was used to design various minimal polypeptides using core elements of the 4-1 BBL, but always excluding a mutation or truncation in those regions shown to be conserved in receptor ligand interaction. to These relevant positions include Q98, V100, Y110, G114, L115, A116, R150, R151, V152, V153, A154, Q227 and Q230 of SEQ ID NO: 2 (see FIG. 2C of Chin et al supra). Despite these important residues, the polypeptides seemed to tolerate certain further mutations, in particular when substituting an amino acid against an amino acid having the same property, whereas sterically demanding and/or cysteine insertions were avoided (i.e., in the cluster hydrophobic-aliphatic (Ala, Ile, Leu, Met, Val), hydrophobic aromatic (Phe, Trp, Tyr), polar neutral (Asn, Cys, Gln, Ser, Thr), charged acidic (Asp, Glu), charges basic or nearly neutral (Arg, Lys, His), Pro, or nonpolar (Gly) (data not shown).

[0117] Further, a true minimal domain of the TNF homology domain (SEQ ID NO: 1) was constructed having maximum flexibility and being devoid of the cysteine residues of the naturally occurring 4-1BBL. Therefore, a core soluble ectodomain s4-1 BBL and several variants thereof were constructed maintaining the essential trimerization potential, either intrinsically, or when combined with a trimerization domain and the core TNF homology domain relevant for receptor interaction, but lacking the membrane anchor domain and further amino acid positions hampering a proper and flexible polypeptide design for therapeutic purposes.

[0118] In certain embodiments of the various aspects of the present invention, the 4-1 BBL ectodomain of the costimulatory polypeptide may thus comprise or consist of a sequence according to SEQ ID NOs: 3 to 6, or a polypeptide with a sequence having at least 90%, 91%, 92%, 93%, 94%, 95%, 96%, 97%, 98% or 99% sequence identity to the respective sequence, or a nucleic acid sequence encoding the same. In specific embodiments, the at least one 4-1BBL ectodomain of the costimulatory polypeptide comprises SEQ ID NO: 3, or a polypeptide with a sequence having at least 90%, 91%, 92%, 93%, 94%, 95%, 96%, 97%, 98% or 99% sequence identity to SEQ ID NO: 3, or a nucleic acid sequence encoding the same. In specific embodiments, the at least one 4-1 BBL ectodomain of the costimulatory polypeptide comprises SEQ ID NO: 4, or a polypeptide with a sequence having at least 90%, 91%, 92%, 93%, 94%, 95%, 96%, 97%, 98% or 99% sequence identity to SEQ ID NO: 4, or a nucleic acid sequence encoding the same. In specific embodiments, the at least one 4-1 BBL ectodomain of the costimulatory polypeptide comprises SEQ ID NO: 5, or a polypeptide with a sequence having at least 90%, 91%, 92%, 93%, 94%, 95%, 96%, 97%, 98% or 99% sequence identity to SEQ ID NO: 5, or a nucleic acid sequence encoding the same. In specific embodiments, the at least one 4-1 BBL ectodomain of the costimulatory polypeptide comprises SEQ ID NO:6, or a polypeptide with a sequence having at least 90%, 91%, 92%, 93%, 94%, 95%, 96%, 97%, 98% or 99% sequence identity to SEQ ID NO: 6, or a nucleic acid sequence encoding the same.

[0119] In certain embodiments of the various aspects of the present invention, the at least one 4-1BBL ectodomain polypeptide may comprise at least one trimerization domain. The at least one trimerization domain allows either trimerization as such, or the formation of higher order oligomers (hexamers etc.), which may additionally favor immunomodulation and activity. Such an oligomerization was observed for certain polypeptides of the present invention as favorable effect. In some embodiments, an additional linker between the at least one trimerization domain and the at least one (first) s4-1BBL domain may be used, in other embodiments, the at least one trimerization domain may be directly connected and operably linked to the (first) s4-1BBL domain. Likewise, in some embodiments, an additional linker between the leader sequence and a subsequent domain (tag or trimerization, or s4-1BBL domain) may be used, in other embodiments, this linker may be omitted. Long linkers (abbreviated as “LL”), and short linkers (abbreviated as “sh”) and various combinations of these have been tested in connection with the various costimulatory polypeptide of the present invention, either for the recombinant polypeptides as such, or for the polypeptides as expressed in various OVs of different origin. Exemplary polypeptides and nucleic acids encoding these polypeptides are shown in the sequence listing. A trimerization domain may be preferably positioned at the N-terminal or C-terminal end of the at least one costimulatory polypeptide comprising at least one 4-1BBL ectodomain, as this design allows a proper inherent trimerization of the 4-1BBL ligand. In other embodiments, the trimerization domain may be positioned between individual s4-1BBL domains in triple polypeptides.

[0120] Notably, no non-human sequences were incorporated into the new polypeptides and consequently adverse side effects are expected to be minor, which is of utmost importance for clinical and therapeutic applications. If artificial elements, for example, linkers or tags for purification, are used, these can be easily positioned in a polypeptide such that the artificial elements can be cleaved away after expression and purification. When expressed in an OV, the fully human core sequence of 4-1BBL can be elegantly expressed and presented to an immune cell without the need of a non-human sequence, if desired.

[0121] A second aspect of the present invention relates to a costimulatory polypeptide, comprising (a) (i) at least one 4-1 BBL ectodomain and a trimerization domain, and/or (ii) at least one 4-1BBL ectodomain and at least one leader sequence, and optionally at least one affinity tag; preferably wherein each 4-1BBL ectodomain comprises a minimal Tumor Necrosis Factor (TNF) Homology Domain according to SEQ ID NO: 1, or a sequence having at least 90%, 91%, 92%, 93%, 94%, 95%, 96%, 97%, 98% or 99% sequence identity to SEQ ID NO: 1 ora nucleic acid sequence encoding such costimulatory polypeptide, wherein the trimerization domain is a human or humanized trimerization domain; and wherein the 4-1BBL ectodomain comprises or consists of a sequence according to SEQ ID NOs: 3 to 6 or a polypeptide with a sequence having at least 90%, 91%, 92%, 93%, 94%, 95%, 96%, 97%, 98% or 99% sequence identity to the respective sequence, or a nucleic acid sequence encoding the same.

[0122] According to certain embodiments of the various aspects of the present invention, the polypeptides as disclosed herein may comprise a leader sequence. Leader sequences in terms of the present invention include all sequences, which are known to be involved in cellular trafficking and involve also all sequences that are known as “signal peptides” or “signal sequences” from the state of the art. An exemplary leader sequence is represented in SEQ ID NO: 17. Recombinant protein production may always be challenged with ensuring the correct folding and processing of the protein, such as post-translational modifications, to be produced. The folding and processing of proteins may be dependent on the cell compartment where the desired protein ends up. To ensure the correct guide of the desired protein, leader sequences may be used.

[0123] A leader sequence may thus fulfill the purpose of guaranteeing correct intracellular trafficking inside a host cell and/or correct targeting of a protein to the secretory pathway. This has the advantage that a protein or polypeptide comprising such a leader sequence will be correctly processed and/or post-translationally modified and/or will be correctly shuffled outside the cell in its soluble and correctly folded and thus functional form. Leader sequences will usually be adapted to a host cell of interest chosen for expression and/or production of a polypeptide or an OV of the present disclosure. The expression in eukaryotic host systems may have the advantage that the system mimics the natural folding of proteins derived from eukaryotic sequences. The use of a suitable leader sequence can also ensure correct folding in bacterial expression system, e.g. the leader sequence known as OmpA guides a protein of interest to the periplasm in prokaryotes where disulfide bridges are formed and where chaperones are present to assist in a proper protein folding necessary for correct protein/enzymatic function. Another critical point in recombinant protein production may be the glycosylation of eukaryotic proteins. A suitable leader sequence can also ensure the correct trafficking of the proteins to cell compartments where post-translational modifications, such as glycosylation, can take place.

[0124] Bacterial and/or eukaryotic expression systems for the various polypeptides of the present invention leader sequences may also be attached to a sequence encoding a polypeptide of interest, to guarantee that a protein is secreted outside the cell or to the periplasm of a bacterial cell to obtain soluble and correctly folded, and thus functional, polypeptides according to the present invention. Suitable leader and/or secretory signals or sequences are known to the skilled person for established expression systems. One further example (cf. FIGS. 1A and 2A) is the human IgKappa-light chain leader sequence, but, in essence, any leader sequence of a secreted protein having been demonstrated to be functional in secretion of a recombinant protein in a cellular system of interest may be used.

[0125] In certain embodiments of the various aspects of the present invention the costimulatory polypeptide may comprise at least one linker, in particular embodiments wherein the at least one linker comprises or consists of a sequence individually selected from the group consisting of SEQ ID NOs: 9 to 16, or a sequence having at least 90%, 91%, 92%, 93%, 94%, 95%, 96%, 97%, 98% or 99% sequence identity to any one of the sequences SEQ ID NOs: 9 to 16, or a nucleic acid sequence encoding the same, and/or wherein the costimulatory polypeptide, or the sequence encoding the same. In certain embodiments of the various aspects of the present invention, the costimulatory polypeptide additionally comprises at least one affinity tag and/or at least one protease cleavage tag and/or at least one inhibitory domain and/or at least one leader sequence. Linker sequences are well known to the skilled person and represent connecting elements in fusion proteins and multidomain polypeptides. Empirically, they are generally classified into three categories according to their structures: flexible linkers, rigid linkers, and in vivo cleavable linkers. All of these linkers may be used at the various positions, alone or in combination, in the various polypeptides as disclosed herein. Based on the inherent nature of a linker, the linker should be immunologically inert and/or removable (e.g. by defined proteases and/or chemicals). It is rather the function of a linker to improve folding and stability of the actual fusion protein or multidomain effector and/or to guarantee a correct spacing of the individual domains and thus a proper function thereof. The most commonly used flexible linkers have sequences consisting primarily of stretches of Gly and Ser residues (“GS” linker). Exemplary linkers of this kind are provided for with SEQ ID NOs: 9 to 16. Usually, these individual linker elements can be used in series (for example, 3× the sequence of SEQ IN NO: 11 in a row. A list of linkers as known to the skilled person and as suitable according to the present disclosure can be found in Chen et al. supra. The skilled person can adapt the length of the linker sequence based on the intended spacing properties as of interest to separate two functional moieties in a multi-domain polypeptide.

[0126] According to the various embodiments disclosed herein, a polypeptide encoding a costimulatory polypeptide according to the present invention may thus comprise at least one sequence encoding a linker providing a spacer function to properly separate the individual domains of a polypeptide, including at least one 4-1BBL encoding sequence and optionally at least one tag, at least one leader sequence, at least one inhibitory domain, at least one trimerization domain etc.

[0127] In certain embodiments according to the various aspects disclosed herein, the at least one costimulatory polypeptide comprising at least one 4-1BBL ectodomain may additionally comprise another effector domain provided as a fusion protein, optionally a cleavable fusion protein, together with the at least one costimulatory polypeptide comprising at least one 4-1BBL ectodomain of the present invention. For example, an effector domain may be selected from the group consisting of cancer targeting domains (capable of binding to a tumor-specific structure and/or -overexpressed surface ligand), an additional co-stimulatory signal to T- and/or NK-cells, a domain mediating prevention of inhibitory signaling (e.g. PD-1/PD-L1 interference), prodrug converters, toxins, reporter moieties for diagnostic/imaging purposes, therapeutic proteins, cytokines and chemokines, or a Fc-domain enhancing half-life time of a polypeptide, or combinations thereof.

[0128] As noted above certain embodiments of the aspects as disclosed herein may also comprise the use of at least one affinity tag. Affinity tags are generally fused to a recombinantly produced protein and can be used for protein purification to remove the protein of interest specifically from the crude cell culture broth. Examples for affinity tags well known in the art are chitin binding protein (CBP), maltose binding protein (MBP), Strep-tag and glutathione-S-transferase (GST). The poly(His) tag is commonly used and binds to metal matrices. Besides affinity tags, a variety of different protein tags are known which serve several functions such as marking the protein of interest for subsequent analysis, offering a solubilization tag for bacterial cell culture or marking the protein of interest via a fluorescence tag. Affinity tags as well as all other known protein tags can be easily removed from the product by enzymatic cleavage with proteases, in case a protease cleavage site is included into a polypeptide of interest. This may be preferable for therapeutic applications of the polypeptides as disclosed herein in view of the fact that the at least one tag first guarantees the purification of a s4-1BBL polypeptide to high purity, but the tag, as such usually not being of human origin, can then be removed from the recombinant polypeptide before a therapeutic use.

[0129] Proteases can be commonly used to reprocess the protein of interest and to remove tags, linkers, leader sequences or other specific polypeptide sequences from the protein of interest. For this purpose, protease cleavage sites may be incorporated in certain embodiments of the aspects as disclosed herein. A suitable protease may be selected from the group consisting of Arg-C proteinase, Asp-N endopeptidase, BNPS-Skatole, CNBr. Chymotrypsin, Clostripain, Glutamyl endopeptidase, LysC, LysN, Pepsin, Proline-endopeptidase, Proteinase K, Staphylococcal peptidase, Thermolysin, Trypsin, Caspase1, Caspase10, Caspase2, Caspase3, Caspase4, Caspase5, Caspase6, Caspase7, Caspase8, Caspase9, Enterokinase, Factor Xa, GranzymeB, Thrombin, Tobacco etch virus protease, SUMO-specific protease Ulp1p (scUlp1), ubiquitin (Ub), NEDD8, scAtg4, Atg8, xIUSP2, bdSENP1 and bdNEDP1 from Brachypodium distachyon (bd), as well as ssNEDP1 from salmon (Salmo salar). The corresponding protein cleavage sites can be predicted with various available bioinformatics tools well known in the art.

[0130] In embodiments where the costimulatory polypeptide of the present invention is expresses as part of an OV, other protease recognition sites can be inserted, such as a capsid cleavage site as occurring in many naturally occurring viral polyproteins, which are needed for a processing of a virus by host cell and viral proteases. This effect can be mimicked by using a capsid cleavage site as artificial tag in any of the polypeptides as used herein, and, preferably, in an OV, as this will allow the processing inside a host cell of interest.

[0131] In yet another embodiment of the disclosed aspects, the costimulatory polypeptide may be encoded by a nucleic acid sequence selected from the group consisting of SEQ ID NOs: 47, 49, 51, 53, 55, 57, 59, 61, 63, 65, 67, 69, 71, 73, 75, 77 or 79 or a sequence having at least 70%, 71%, 72%, 73%, 74%, 75%, 76%, 77%, 78%, 79%, 80%, 81%, 82%, 83%, 84%, 85%, 86%, 87%, 88%, 89%, 90%, 91%, 92%, 93%, 94%, 95%, 96%, 97%, 98% or 99% sequence identity to any one of the sequences SEQ ID NOs: 47, 49, 51, 53, 55, 57, 59, 61, 63, 65, 67, 69, 71, 73, 75, 77 or 79.

[0132] In certain embodiments of the various aspects of the present invention, the costimulatory polypeptide may comprise a Kozak sequence preceding the coding sequence to enhance protein translation by providing a suitable protein translation initiation site for the mRNA as encoded. An exemplary Kozak sequence is shown in SEQ ID NO: 80.

[0133] Notably, all nucleic acid sequences encoding at least one costimulatory 4-1BBL ectodomain polypeptide, either as part of a nucleic acid vector, or as part of an OV, may be codon optimized or at least partially codon optimized, preferably for the codon usage of a human cell in the case of an OV. For other recombinant expression systems for producing at least one costimulatory 4-1BBL ectodomain polypeptide, it may also be preferable to choose the codon usage of the host cell of interest to obtain an optimum transcription and translation to avoid the commonly known phenomenon that rare codons in a given host cell may significantly hamper translation.

[0134] In a third aspect of the present invention, there may be provided a vector comprising a nucleic acid sequence encoding a costimulatory polypeptide according to the various aspects of the present invention.

[0135] A vector according to the present invention may be selected from any suitable vector for usage with the chosen expression system, such as bacterial, mammalian, plant, insect cell or yeast cell systems. Suitable vector systems for a variety of expression systems are well known in the art and a variety of suitable vectors as tested are disclosed in the attached sequence listing.

[0136] At least one vector comprising a nucleic acid sequence encoding a costimulatory polypeptide may be used to transfer the polypeptides according to the present invention into a host cell for recombinant protein production or for delivering the co-stimulatory polypeptides to a cell of interest. If a cell of interest should be targeted, this cell may be a tumor cell and the delivering vector may be an oncolytic virus.

[0137] In one embodiment of the above aspect, the vector may comprise a sequence encoding an expression vector, or an oncolytic virus, wherein the oncolytic virus may be selected from the group consisting of a vaccinia virus, a myxoma virus, an adenovirus, a herpes virus, a reovirus, a Zika virus, a vesicular stomatitis virus, a parvovirus, a poliovirus, an influenza virus, an to arenavirus, a coxsackie virus, a semliki forest virus, a sindbis virus, a maraba virus, a seneca valley virus, a Newcastle disease virus, a mumps virus, and a measles virus, or combinations and/or chimera thereof.

[0138] As introduced above, cancer immuno-therapy is presently a promising new therapeutic strategy. Generally, it relies on the activation and arming of the immune system against tumors/cancers, as it is a feature of almost all cancers to escape from the immune system. There are many different approaches to address this problem, wherein oncolytic virus therapy (OVT) is one of the most encouraging technologies for providing new therapeutics. Oncolytic viruses (OVs) offer several advantages in cancer therapy as they have the dual function to activate the immune system to recognize and attack cancerous cells. Further, OVs may directly infiltrate and specifically kill cancer and cancerous cells.

[0139] According to the present invention, the OVs can be equipped with the costimulatory polypeptides of the present invention as functional effector or “payload”. To this end, T cells can be specifically activated and targeted to malignant tissue.

[0140] An OV according to the various aspects and embodiments disclosed herein will usually be an attenuated virus in comparison to the cognate wild-type virus, i.e., an attenuated virus lacking virulence and pathogenicity traits, but retaining its capacity to replicate and specifically target cells in an in vivo or in vitro context.

[0141] In another embodiment of the above second aspect, there is thus provided an oncolytic virus encoded by a vector according to the second aspect, wherein the oncolytic virus may comprise a costimulatory polypeptide as payload according to the first or second aspect and embodiments thereof of the present invention. The OV will thus present the at least one 4-1BBL costimulatory polypeptide to the immune system to synergistically activate the immune system together with the inherent cancer targeting capabilities of the OV. Several different OVs harboring and expressing at least one 4-1BBL costimulatory polypeptide are detailed herein below and in the sequence listing provided. In case the OV is originating from a measles virus (MV), this OV vehicle naturally targets the host cell receptors CD46, SLAM/CD150 and PVRL4 (nectin-4). Therefore, MV (without any payload) is already latently oncotropic in nature and possesses oncolytic properties by syncytia formation and lytic effects. In artificial MVs as to disclosed herein, in particular when combined with at least one 4-1BBL costimulatory polypeptide of the present invention, allows the provision of a highly specific agent for viral-based oncolytic therapy. MV is generally of round shape but shows pleomorphism, i.e. the appearance of two or more distinctly different forms in the life cycle of some organisms. It contains single-stranded RNA of negative polarity. It is an enveloped virus with non-segmented genome. Replicating recombinant MV has been shown to represent a valuable backbone or vector for providing safe and efficient viral vectored vaccines against several emerging infectious diseases (Reisinger et al., Lancet, 2019, 392(10165):2718-2727; Schrauf et al., Front. Immunol., 2020, 11:592). Using MV as cargo or vector for oncolytic therapy thus may build upon experience gained for MV vaccines and MV-based viral vectored vaccines as established over many decades. Additionally, further properties, particularly a tumor tropism and thus tumor-specificity, can be additionally exploited during OV based on a MV structure or vector.

[0142] Generally, other types of OVs can be used as vehicles or backbones for transporting additional payloads to a tumor target site. The primary mechanism of tumor/cancer targeting will depend on the properties of the OV usually representing a modified and attenuated version of a naturally occurring virus. This OV represents the vector or backbone for introducing at least one payload. In certain embodiments, the OV of interest may comprise more than one payload, wherein at least one of the payloads is at least one 4-1BBL costimulatory polypeptide of the present invention. For example, a vaccinia virus (VV) may be used as OV. As for MV, the virus biology and life cycle of VV is well understood and preceding data for using VV in vaccination studies exist, which may expedite the development of VV-based OVs equipped with at least one 4-1BBL polypeptide according to the present invention (cf. Kim et al., Host lymphodepletion enhances the therapeutic activity of an oncolytic vaccinia virus expressing 4-1BB ligand. Cancer Res. 2009; 69:8516-25). Thymidine kinase deletion can prevent VV (a DNA virus) replication in cells with a low nucleotide pool. DNA viruses usually rely upon many different mechanisms to increase dNTP levels in infected cells, because the low concentration of dNTPs found in non-cycling cells can inhibit virus replication. By disrupting the virus-encoded gene(s) that normally promote dNTP biosynthesis, oncolytic versions of, for example, VV can be created that replicate selectively in cancer cells (Irwin et al., Front. Oncol., 2017, 7:229).

[0143] The choice of the OV backbone when used in the context of the present invention will usually depend on the indication, i.e., the type of tumor/cancer to be targeted in view of the fact that each OV originates from a naturally occurring virus with a specific patho-biology and, in turn, to tumor specificity. For example, adenovirus may be configured to selectively target cells with aberrant mRNA transport due to adenovirus E1B protein deletion to be used to combat head and neck tumors, coxsackie virus may be used to target DAF (intracellular adhesion molecule 1), which is overexpressed in cancer cells, so that this OV can be used to target melanomas, herpes virus can be modified by a ICP34.5 deletion to restrict replication to cells with a (highly) active replication, as it is the case for many cancer cells, including melanoma cells, glioma, astrocytoma, glioblastoma, squamous cell carcinoma of head and neck etc. Newcastle disease virus (NDV) as OV also can built upon around fifty years of clinical application giving witness to the high safety profile of this biological agent. Since NDV as avian virus has neither adverse effects on human cells nor any pathology, it can be used as OV in cancer patients. NDV is naturally unable to replicate in interferon-responsive cells and can be equipped in line with the present disclosure to target, for example, metastatic cancers. Reoviruses (mammalian orthoreoviruses) are non-enveloped viruses that contain segmented dsRNA. Clinical manifestations associated with natural reovirus infection make this virus an ideal candidate for development for cancer virotherapy that can be used even in immunocompetent and immunocompromised patients. Oncolysis relies on the intrinsic capacity of reovirus to kill cancer cells. Reoviruses modulate interferon (IFN) responses during an infection with the virus, wherein the IFN-1 response is a key element of the innate immune response to reovirus. Within infected cells, viral RNAs are detected by cellular pattern recognition receptors (PRRs), including retinoic acid inducible gene-I (RIG-I), melanoma differentiation-associated protein 5 (MDA5), toll-like receptors, and the dsRNA-activated protein kinase R (PKR) ultimately leading to an NF-κB) and activator protein-1 (AP-1) activation to induce expression and secretion of IFN-1 (IFN-α and IFN-(3). Additionally, the EGFR signaling pathway via Ras plays a critical role in growth and survival of reoviruses during natural infections (Philipps et al., Oncolytic Virother., 2018, 7: 53-63). In OV clinical trials, reovirus is thus used to target metastatic cancers and glioma. Seneca valley virus also has an inherent capacity to target tumor cells. This virus of the Picornaviridae family has a high tropism towards neuroendocrine expressing tumor cells has been shown to induce cytotoxicity in tumors expressing neuroendocrine features, such as synaptophysin, chromogranin A, and neuron-specific enolase, in several in vitro and in vivo models (Burke, Oncolytic Virother., 2016, 5: 81-89).

[0144] Therefore, various OVs to be used according to the present invention are known to the skilled person. These OVs can be individually equipped with the highly active 4-1 BBL costimulatory polypeptides according to the present invention to favourably stimulate 4-1BB/CD137 signaling to achieve a co-stimulation of T-cells to break cancer immune evasion of cancer cells and tumors by additionally targeting a T-cell response to a cancer/tumor to be treated.

[0145] In certain embodiments of the present invention, the vectors and polypeptides disclosed herein may be used in combination with adoptive T cell transfer, such as infusion of isolated and ex vivo cultivated tumor-infiltrating lymphocytes (TIL) and/or a CAR T-cell strategy. As for the combination with an OV, this strategy allows the combination of the adoptively transferred T-cells (that can be genetically engineered, e.g. to express a chimeric antigen receptor (CAR) and thus specifically directed towards antigens on cancer/tumor cells) with the costimulatory effects of the 4-1 BBL polypeptides of the present invention to additionally activate the endogenous immune response of a patient in a specific manner. To this end, blood cancers like lymphoma and leukemia can be treated, as well as solid tumors. To this end, an activation with the specific 4-1BBL costimulatory polypeptides may assist in breaking the immuno-evasive tumor microenvironment so that CAR-T-cells, which usually do not traffic efficiently into solid tumors, in particular, cold tumors, can reach antigens expressed on target cancer cells of a solid tumor/cancer.

[0146] Moreover, the 4-1BBL costimulatory polypeptides of the present invention can be used during the ex vivo cultivation of T cells and/or NK cells in preparation of an adoptive cell transfer to improve their therapeutic potential.

[0147] In a fourth aspect of the present invention, there is provided a method of producing a costimulatory polypeptide, wherein the method comprises: (i) providing a vector according to the above second aspect and embodiments thereof encoding a costimulatory polypeptide, (ii) introducing the vector into a host cell; (iii) culturing the host cell under conditions suitable for expression of the costimulatory polypeptide; (iv) optionally: isolating and purifying the costimulatory polypeptide; and (v) obtaining the costimulatory 4-1 BBL polypeptide.

[0148] In a fifth aspect of the present invention, there is provided a method of producing an oncolytic virus expressing a costimulatory polypeptide, wherein the method comprises: (i) providing a vector as defined according to the second aspect and embodiments thereof encoding an oncolytic virus comprising the costimulatory polypeptide, (ii) introducing the vector into a host cell, (iii) culturing the host cell under conditions suitable for expression and thus replication of the oncolytic virus, (iv) optionally: rescuing the oncolytic virus; (v) optionally: purifying the oncolytic virus as obtained in step (iii) or (iv); and (vi) obtaining an oncolytic virus.

[0149] Techniques for general cloning of the above polypeptides are generally available to the skilled person (Green and Sambrook, Molecular Cloning, A Laboratory Manuel 4^{th} edition, last updated 18 Nov. 2014).

[0150] Rescue techniques are needed in the context of certain OVs in view of the fact that the artificial OVs comprising a payload have to be obtained in an active, i.e. infectious and replicative form. These rescue techniques depend on the biology of the virus an OV originates from. For certain OVs as disclosed herein, rescue techniques are available to the skilled person for the various DNA- and RNA-viruses as disclosed herein (cf. WO 2017/109222, or, for CMV RNA polymerase II promoter containing plasmids, WO 2012/022495). Further rescue systems are available for various viruses to the skilled person to obtain functional recombinant infectious virus particles including a payload as disclosed herein. Generally, the rescue technique will depend on the type of genome and the biology of a virus of interest to be used as OV.

[0151] Further, a costimulatory polypeptide and/or an oncolytic virus comprising such a polypeptide according to the present invention can be further purified to obtain a high degree of purity needed for therapeutic applications. For costimulatory 4-1BBL polypeptides as recombinant protein, various purification strategies, inter alia, relying on the use of affinity tags etc., are available for the skilled person.

[0152] Purification strategies for oncolytic viruses are also available to the skilled person in the relevant technical field. To this end, it is pointed out that the purification will largely depend on the diameter and/or the physico-chemical properties (in particular, of the surface exposed parts) of an OV of interest. In particular, for MV as a large and pleomorphic virus, purification has been difficult. Meanwhile, suitable purification strategies are also available for this sterically demanding virus (cf. WO 2019/238919).

[0153] Based on the functional data generated with the various costimulatory polypeptides according to the present invention based on the core and soluble TNF homology domain, either alone, or as part of an OV, it could be shown that these polypeptides indeed have superior functionality in T-cell activation (see Examples below) and thus can be used for a broad range of cancer therapeutic strategies in view of the central role of the 4-1 BBL signaling in T-cell activation to urgently needed as further line of anti-tumor activity.

[0154] In a sixth aspect of the present invention, there is provided a pharmaceutical composition which may comprise a costimulatory polypeptide according to the first or second aspect and embodiments thereof as defined above and/or an oncolytic virus according to the third aspect and embodiments thereof as defined above, and/or as obtained according to the fifth aspect of the present invention as defined above, optionally further comprising at least one pharmaceutically acceptable carrier and/or optionally comprising, in combination with the costimulatory polypeptide, at least one further pharmaceutically active ingredient, the further pharmaceutically active ingredient being selected from at least one chemotherapeutic agent, at least one antibody, antibody-like molecule or antibody mimetic, or at least one checkpoint modulator, particularly a checkpoint inhibitor.

[0155] It is well known that many cancer drugs are more effective when given in combination. The rationale for combination therapy is to use drugs that work by different mechanisms, thereby decreasing the likelihood that resistant cancer cells will develop. When drugs with different effects are combined, each drug can be used at its optimal dose, without intolerable side effects. For some cancers, the best conventional approach is a combination of cancer surgery, radiation therapy, and chemotherapy or other cancer drugs. Surgery or radiation therapy treats cancer that is confined locally, while cancer drugs also kill the cancer cells that have spread to distant sites. Sometimes radiation therapy or drug therapy is given before surgery to shrink a tumor, thereby improving the opportunity for complete surgical removal (this technique is called neoadjuvant therapy). Radiation therapy and/or drug therapy given after surgery (called adjuvant therapy) help/s to destroy any remaining cancer cells (see Gale, Combination Cancer Therapy, MSD Manuals, September 2020).

[0156] The skilled person is well aware of the fact that there are various kinds of classes of chemotherapeutic agents usually used in combination for combating a specific type of cancer. Chemotherapeutic agents include, but are not limited to alkylating alkylating agents, anthracyclines, cytoskeletal disruptors (e.g., taxanes), epithilones, histone deacetylase inhibitors, inhibitors of topoisomerase I, inhibitors of topoisomerase II, kinase inhibitors, nucleotide analogs and precursor analogs, (peptide) antibiotics, platinum-based agents, retinoids, vinca alkaloids and derivatives thereof, and any combination or biosimilar thereof. A chemotherapeutic agent as used herein can thus refer to a biological, a chemical, or a radionuclide suitable for radiopharmaceutical therapy.

[0157] Further, other agents suitable for effective and site-directed cancer/tumor therapy are antibodies, fragments thereof and associated formats. Any suitable antibody, antibody fragment, antibody-like molecule or antibody mimetic suitable to target and/or combat a cancer-associated target molecule can be used according to the present invention. A plethora of suitable engineered antibody formats to be used as combination agent, or to be encoded by an oncolytic virus of the present invention are known to the skilled person (see De Vlieger et al., Antibodies 2019, 8, 1, doi:10.3390/antib8010001; Lu, et al. Development of therapeutic antibodies for the treatment of diseases. J Biomed Sci 27, 1 (2020). https://doi.org/10.1186/s12929-019-0592-z; Deuschle et al., (2021) Anticalin® proteins: from bench to bedside, Expert Opinion on Biological Therapy, 21:4, 509-518, DOI: 10.1080/14712598.2021.1839046; Sheridan, C. Bispecific antibodies poised to deliver wave of cancer therapies. Nat Biotechnol 39, 251-254 (2021). https://doi.org/10.1038/s41587-021-00850-6).

[0158] In certain embodiments, conjugates (covalent and non-covalent) of two therapeutic agents may be used.

[0159] Oncolytic viruses (OVs) expand the way of providing suitable cancer combating effectors to a cell, either alone, or in combination. OVs are extremely suitable as cancer-targeted therapeutic, either alone or in combination with a conventional cancer therapeutic strategy, because they are able to selectively amplify within the tumor milieu increasing the local therapeutic dose over time. Further, OVs— in addition to their cancer-tropic activities—can be used to locally express cancer therapeutic proteins to cancer cells. OVs according to the present invention may this be equipped with at least one payload as disclosed herein, or with another payload to provide a combination of at least two payloads for improving cancer therapy. OVs may thus be equipped with at least one further pharmaceutically active ingredient may be selected from a cis and/or trans combination pharmaceutically active ingredient (cf. Martin and Bell et al., Molecular Therapy, vol. 26, 6, 2018, pp. 1414-1422).

[0160] In line with the definition of Martin and Bell, supra, the term “cis combination” as used herein describes approaches that involve encoding of further transgenes within an OV virus backbone, to and “trans combinations” are used to describe the coupling of a costimulatory polypeptide, or a costimulatory polypeptide encoded by an OV with another stand-alone therapeutic e.g., drugs, antibodies, cells, other OV, or any other pharmaceutically active chemotherapeutic agent as defined above.

[0161] In certain embodiments, preferred combinations of pharmaceutically active ingredients may additionally comprise at least one further pharmaceutically active agent active in cis and/or a trans in combination to the costimulatory polypeptide and/or the at least one oncolytic virus comprising the at least one costimulatory polypeptide according to the present invention.

[0162] Either an isolated costimulatory polypeptide according to the various aspects of the present invention, or an OV expressing and presenting the same can be used as a therapeutic agent, preferably in combination with suitable pharmaceutically acceptable carriers and/or excipients and within a pharmaceutical formulation guaranteeing stability and safety of the relevant biopharmaceutical. Generally, the pharmaceutical composition can be provided as solid or fluid composition, for example, as a lyophilized product to be dissolved in an aqueous solvent, or as liquid formulation already comprising stabilizing and pharmaceutically acceptable buffers, excipients etc.

[0163] As could be demonstrated, the various polypeptides and OVs according to the present invention have a 4-1BB receptor signaling modulating activity and, in combination with an OV, a specific cancer-tropism as mediated by the OV.

[0164] In a seventh aspect of the present invention, there is thus provided a costimulatory polypeptide according to the first or second aspect and embodiments thereof as defined above, and/or an oncolytic virus according to the third aspect and embodiments thereof as defined above, and/or as obtained according to the fifth aspect as defined above which can be used in a method of treating cancer.

[0165] There is thus provided a method of treating a cancer in a subject by providing an effective amount of a costimulatory polypeptide and/or an oncolytic virus expressing a costimulatory polypeptide of the present invention. When combined with the OV technology, a specific targeting and expression of the at least one 4-1 BBL can be obtained, which may be of particular to relevance to break the dormant state of, for example, cold tumors that are difficult to target in therapy.

[0166] Further provided is the use of an effective amount of a costimulatory polypeptide and/or an oncolytic virus expressing a costimulatory polypeptide of the present invention in a method of treating cancer in a subject in need thereof.

[0167] Further provided is use of an effective amount of a costimulatory polypeptide and/or an oncolytic virus expressing a costimulatory polypeptide of the present invention in the manufacture of a medicament for the treatment of cancer in a subject in need thereof.

[0168] In one embodiment of the foregoing: (i) methods of treating cancer, (ii) uses in a method of treating cancer, or (iii) uses in the manufacture of a medicament for treating cancer, the cancer may be selected from bladder cancer, breast cancer, prostate cancer, basal cell carcinoma, biliary tract cancer, bone cancer, brain and central nervous system cancer (e.g., glioma), adenocarcinomas, lung cancer, cervical cancer, choriocarcinoma, colon and rectum cancer, connective tissue cancer, cancer of the digestive system; cancer of the small intestine and cecum; endometrial cancer, esophageal cancer; eye cancer; cancer of the head and neck; gastric cancer; intra-epithelial neoplasm; kidney cancer; larynx cancer; leukemia; liver cancer; gall bladder cancer lung cancer (e.g., small cell and non-small cell); lymphoma including Hodgkin's and Non-Hodgkin's lymphoma; melanoma; myeloma, neuroblastoma, oral cavity cancer (e.g., lip, tongue, mouth, and pharynx); cancer of the salivary glands; ovarian cancer; pancreatic cancer, retinoblastoma; rhabdomyosarcoma; rectal cancer, renal cancer, cancer of the respiratory system; sarcoma, skin cancer; stomach cancer, testicular cancer, thyroid cancer; uterine cancer, cancer of the urinary system, as well as other carcinomas and sarcomas.

[0169] In another embodiment of the foregoing: (i) methods of treating cancer, (ii) uses in a method of treating cancer, or (iii) uses in the manufacture of a medicament for treating cancer, the cancer is a cold tumor or a hot tumor. As detailed above, 4-1 BBL-mediated signaling can specifically convert a dormant cold tumor so that the cancer cells can be additionally attacked by the T-cells of a patient so that immuno-evasion can be broken.

[0170] Various drug delivery techniques and vehicles are known to the skilled person to deliver the at least one costimulatory polypeptide to a cancerous site in a subject in need thereof, including, to for example, direct injections, but also compounds based on synthetic polymers, proteins, lipids, and organic and inorganic particles approved for cancer therapeutics, which compounds or vehicles may be in the nanoscale. Compared with the direct administration of bare chemo-drugs, drug encapsulation in a vehicle can offer a number of advantages, such as protection from degradation in the bloodstream, better drug solubility, enhanced drug stability, targeted drug delivery, decreased toxic side effects and improved pharmacokinetic and pharmacodynamic drug properties.

[0171] To prepare pharmaceutical or sterile compositions of the polypeptides and oncolytic viruses, the polypeptide or oncolytic virus is admixed with a pharmaceutically acceptable carrier or excipient. See, e.g., Remington's Pharmaceutical Sciences and U.S. Pharmacopeia: National Formulary, Mack Publishing Company, Easton, PA (1984).

[0172] Formulations of therapeutic and diagnostic agents may be prepared by mixing with acceptable carriers, excipients, or stabilizers in the form of, e.g., lyophilized powders, slurries, aqueous solutions or suspensions (see, e.g., Hardman, et al. (2001) Goodman and Gilman's The Pharmacological Basis of Therapeutics, McGraw-Hill, New York, NY; Gennaro (2000) Remington: The Science and Practice of Pharmacy, Lippincott, Williams, and Wilkins, New York, NY; Avis, et al. (eds.) (1993) Pharmaceutical Dosage Forms: Parenteral Medications, Marcel Dekker, NY; Lieberman, et al. (eds.) (1990) Pharmaceutical Dosage Forms: Tablets, Marcel Dekker, NY; Lieberman, et al. (eds.) (1990) Pharmaceutical Dosage Forms: Disperse Systems, Marcel Dekker, NY; Weiner and Kotkoskie (2000) Excipient Toxicity and Safety, Marcel Dekker, Inc., New York, NY).

[0173] Toxicity and therapeutic efficacy of the antibody compositions, administered alone or in combination with another agent, can be determined by standard pharmaceutical procedures in cell cultures or experimental animals, e.g., for determining the LD50 (the dose lethal to 50% of the population) and the ED50 (the dose therapeutically effective in 50% of the population). The dose ratio between toxic and therapeutic effects is the therapeutic index (LD50/ED50). In particular aspects, polypeptides and oncolytic viruses exhibiting high therapeutic indices are desirable. The data obtained from these cell culture assays and animal studies can be used in formulating a range of dosage for use in human. The dosage of such compounds lies preferably within a range of circulating concentrations that include the ED50 with little or no toxicity. The dosage may vary within this range depending upon the dosage form employed and the route of administration.

[0174] In a further embodiment, a composition comprising a polypeptide or oncolytic virus disclosed herein is administered to a subject in accordance with the Physicians' Desk Reference 2003 (Thomson Healthcare; 57th edition (Nov. 1, 2002)).

[0175] The mode of administration can vary. Suitable routes of administration include parenteral; intramuscular, subcutaneous, intradermal, intramedullary, intrathecal, direct intraventricular, intravenous, intraperitoneal, or intra-arterial.

[0176] In particular embodiments, the anti-target antibody or antigen binding fragment thereof can be administered by an invasive route such as by injection (see above). In further embodiments of the invention, a polypeptide, oncolytic virus, or pharmaceutical composition thereof, is administered intravenously, subcutaneously, intramuscularly, intra-arterially, or intratumorally.

[0177] Compositions can be administered with medical devices known in the art. For example, a pharmaceutical composition of the invention can be administered by injection with a hypodermic needle, including, e.g., a prefilled syringe or autoinjector.

[0178] The pharmaceutical compositions disclosed herein may also be administered by infusion.

[0179] Alternatively, one may administer the polypeptide or oncolytic virus in a local rather than systemic manner, for example, via injection directly into a tumor, often in a depot or sustained release formulation.

[0180] The administration regimen depends on several factors, including the serum or tissue turnover rate of the polypeptide or oncolytic virus, the level of symptoms, the immunogenicity of the polypeptide or oncolytic virus, and the accessibility of the target cells in the biological matrix. Preferably, the administration regimen delivers sufficient polypeptide or oncolytic virus to effect improvement in the target disease state, while simultaneously minimizing undesired side effects. Accordingly, the amount of biologic delivered depends in part on the particular polypeptide or oncolytic virus and the severity of the condition being treated.

[0181] Determination of the appropriate dose is made by the clinician, e.g., using parameters or factors known or suspected in the art to affect treatment. Generally, the dose begins with an amount somewhat less than the optimum dose and it is increased by small increments thereafter until the desired or optimum effect is achieved relative to any negative side effects. Important diagnostic measures include those of symptoms of, e.g., the inflammation or level of inflammatory cytokines produced.

[0182] A convenient and fully site-specific technique to present at least one costimulatory polypeptide to the immune system of a subject in need thereof is the delivery of the costimulatory polypeptide as part of an OV as payload. This combination not only allows 4-1 BB receptor interaction and signaling modulation, but it also further allows targeting a polypeptide comprising, or a nucleic acid encoding, at least one costimulatory polypeptide of this invention immediately to a cancer in a highly site-specific manner in view of the tumor tropism of the OV of interest.

[0183] In an additional aspect of the present invention, there is provided a kit, wherein the kit may comprise a costimulatory polypeptide according to the above first or second aspect or an embodiment thereof, or an oncolytic virus expressing a costimulatory polypeptide according to above third aspect or an embodiment thereof, optionally wherein the kit comprising further reagents.

[0184] A kit may thus comprise suitable buffers, reagents and the like for solubilizing and/or stabilizing and/or activating the costimulatory polypeptide according to the methods and uses as disclosed herein. The kit may further comprise at least one protease and reagents for cleaving a tag or sequence within the polypeptides of the present invention in case these polypeptides comprise a protease cleavage site.

[0185] Finally, there is provided the use of an effective amount of costimulatory polypeptide according to the above first or second aspect or an embodiment thereof, or of an oncolytic virus expressing a costimulatory polypeptide according to the above third aspect or an embodiment thereof in an in vitro method for stimulating 4-1 BB expressing cells.

[0186] In line with the above disclosure there is thus provided:

### Embodiment 1

[0187] A costimulatory polypeptide comprising
[0188] (i) at least one 4-1BBL ectodomain and a trimerization domain, and/or
[0189] (ii) at least one 4-1 BBL ectodomain and at least one leader sequence, and optionally at least one affinity tag;
[0190] wherein each 4-1BBL ectodomain consists of a minimal Tumor Necrosis Factor (TNF) Homology Domain of less than 170 amino acids that comprises amino acids 90-240 of SEQ ID NO: 2, or a sequence having at least 92%, 93%, 94%, 95%, 96%, 97%, 98% or 99% sequence identity to amino acids 90-240 of SEQ ID NO: 2;
[0191] wherein the polypeptide binds to 4-1BB on the surface of a 4-1BB expressing cell and thus triggers 4-1BB-mediated immune cell stimulation.

### Embodiment 2

[0192] The costimulatory polypeptide of EMBODIMENT 1,
[0193] wherein the minimal Tumor Necrosis Factor (TNF) Homology Domain comprises amino acids 90-241 of SEQ ID NO: 2, or a sequence having at least 92%, 93%, 94%, 95%, 96%, 97%, 98% or 99% sequence identity to amino acids 90-241 of SEQ ID NO: 2.

### Embodiment 3

[0194] The costimulatory polypeptide of EMBODIMENT 1,
[0195] wherein the minimal Tumor Necrosis Factor (TNF) Homology Domain comprises amino acids 90-242 of SEQ ID NO: 2, or a sequence having at least 92%, 93%, 94%, 95%, 96%, 97%, 98% or 99% sequence identity to amino acids 90-242 of SEQ ID NO: 190-241.

### Embodiment 4

[0196] The costimulatory polypeptide of EMBODIMENT 1,
[0197] wherein the minimal Tumor Necrosis Factor (TNF) Homology Domain comprises amino acids 91-242 of SEQ ID NO: 2, or a sequence having at least 92%, 93%, 94%, 95%, 96%, 97%, 98% or 99% sequence identity to amino acids 91-242 of SEQ ID NO: 2.

### Embodiment 5

[0198] The costimulatory polypeptide of EMBODIMENT 1,
[0199] wherein each 4-1BBL ectodomain consists of the minimal Tumor Necrosis Factor (TNF) Homology Domain according to SEQ ID NO: 1, or any one of SEQ ID NOs: 149 to 155, or a sequence having at least 92%, 93%, 94%, 95%, 96%, 97%, 98% or 99% sequence identity to SEQ ID NO: 1, or SEQ ID NOs: 149 to 155, respectively.

### Embodiment 6

[0200] The costimulatory polypeptide of any one of EMBODIMENTS 1-5 comprising at least three 4-1BBL ectodomains, and optionally comprising at least one trimerization domain.

### Embodiment 7

[0201] The costimulatory polypeptide of EMBODIMENT 6, wherein the trimerization domain is selected from SEQ ID NO: 7 and SEQ ID NO: 8.

### Embodiment 8

[0202] The costimulatory polypeptide of any one of EMBODIMENTS 1-7,
[0203] wherein the trimerization domain is a human or humanized trimerization domain.

### Embodiment 9

[0204] The costimulatory polypeptide of any one of the preceding EMBODIMENTS, wherein the polypeptide comprises at least one linker, wherein the at least one linker is individually selected from the group consisting of SEQ ID NOs: 9 to 16, or a sequence having at least 90%, 91%, 92%, 93%, 94%, 95%, 96%, 97%, 98% or 99% sequence identity to any one of the sequences SEQ ID NOs: 9 to 16, and/or wherein the costimulatory polypeptide additionally comprises at least one affinity tag and/or at least one protease cleavage tag and/or at least one inhibitory domain and/or at least one leader sequence.

### Embodiment 10

[0205] The costimulatory polypeptide of any one of the preceding EMBODIMENTS, wherein the costimulatory polypeptide is encoded by a nucleic acid sequence selected from the group consisting of SEQ ID NOs: 47, 49, 51, 53, 55, 57, 59, 61, 63, 65, 67, 69, 71, 73, 75, 77 or 79 or a sequence having at least 70%, 71%, 72%, 73%, 74%, 75%, 76%, 77%, 78%, 79%, 80%, 81%, 82%, 83%, 84%, 85%, 86%, 87%, 88%, 89%, 90%, 91%, 92%, 93%, 94%, 95%, 96%, 97%, 98% or 99% sequence identity to any one of the sequences SEQ ID NOs: 47, 49, 51, 53, 55, 57, 59, 61, 63, 65, 67, 69, 71, 73, 75, 77 or 79.

### Embodiment 11

[0206] Nucleic acid encoding the costimulatory polypeptide of any one of the preceding EMBODIMENTS.

### Embodiment 12

[0207] A vector comprising a nucleic acid sequence encoding a costimulatory polypeptide according to any one of the preceding EMBODIMENTS.

### Embodiment 13

[0208] The vector according to EMBODIMENT 12, wherein the vector comprises a sequence encoding an expression vector, or an oncolytic virus, wherein the oncolytic virus is selected from the group consisting of a vaccinia virus, a myxoma virus, an adenovirus, a herpes virus, a reovirus, a Zika virus, a vesicular stomatitis virus, a parvovirus, a poliovirus, an influenza virus, an arenavirus, a coxsackie virus, a semliki forest virus, a sindbis virus, a maraba virus, a seneca valley virus, a Newcastle disease virus, a mumps virus, and a measles virus, or combinations or a chimera thereof.

### Embodiment 14

[0209] An oncolytic virus encoded by a vector as defined in EMBODIMENT 12 or 13, wherein the oncolytic virus comprises a costimulatory polypeptide as payload according to any one of EMBODIMENTS 1 to 10.

### Embodiment 15

[0210] A method of producing a costimulatory 4-1BBL ectodomain polypeptide, the method comprising:
[0211] (i) providing a vector according to EMBODIMENT 12 or 13 encoding a costimulatory 4-1BBL polypeptide according to any one of EMBODIMENTS 1 to 10 and introducing the vector into a host cell;
[0212] (ii) culturing the cell under conditions suitable for expression of the costimulatory 4-1BBL polypeptide according to any one of EMBODIMENTS 1 to 10;
[0213] (iii) optionally: isolating and purifying the costimulatory 4-1BBL polypeptide; and
[0214] (iv) obtaining the costimulatory 4-1BBL polypeptide.

### Embodiment 16

[0215] A method of producing an oncolytic virus expressing a costimulatory 4-1BBL ectodomain polypeptide according to EMBODIMENT 14, the method comprising:
[0216] (i) providing a vector according to EMBODIMENT 13 encoding an oncolytic virus and the costimulatory 4-1BBL ectodomain polypeptide and introducing the vector into a host cell,
[0217] (ii) culturing the cell under conditions suitable for expression and thus replication of the oncolytic virus,
[0218] (iii) optionally: rescuing the oncolytic virus;
[0219] (iv) optionally: purifying the oncolytic virus as obtained in step (ii) or (iii); and
[0220] (v) obtaining an oncolytic virus.

### Embodiment 17

[0221] A pharmaceutical composition comprising a costimulatory polypeptide according to any one of EMBODIMENTS 1 to 10 and/or an oncolytic virus according to EMBODIMENT 14, and/or as obtained according to EMBODIMENT 16, optionally further comprising at least one pharmaceutically acceptable carrier and/or optionally comprising, in combination with the costimulatory polypeptide, at least one further pharmaceutically active ingredient, the further pharmaceutically active ingredient being selected from at least one chemotherapeutic agent, at least one antibody, antibody-like molecule or antibody mimetic, or at least one checkpoint modulator, particularly a checkpoint inhibitor.

### Embodiment 18

[0222] A costimulatory polypeptide according to any one of EMBODIMENTS 1 to 10, and/or an oncolytic virus according to EMBODIMENT 14, and/or as obtained according to EMBODIMENT 16 for use in a method of treating cancer.

### Embodiment 19

[0223] The costimulatory polypeptide and/or the oncolytic virus for use in a method of treating cancer according to EMBODIMENT 18, wherein the cancer is selected from bladder cancer, breast cancer, prostate cancer, basal cell carcinoma, biliary tract cancer, bone cancer, brain and central nervous system cancer (e.g., glioma), adenocarcinomas, lung cancer, cervical cancer, choriocarcinoma, colon and rectum cancer, connective tissue cancer, cancer of the digestive system; cancer of the small intestine and cecum; endometrial cancer, esophageal cancer; eye cancer; cancer of the head and neck; gastric cancer; intra-epithelial neoplasm; kidney cancer; larynx cancer; leukemia; liver cancer; gall bladder cancer lung cancer (e.g., small cell and non-small cell); lymphoma including Hodgkin's and Non-Hodgkin's lymphoma; melanoma; myeloma, neuroblastoma, oral cavity cancer (e.g., lip, tongue, mouth, and pharynx); cancer of the salivary glands; ovarian cancer; pancreatic cancer, retinoblastoma; rhabdomyosarcoma; rectal cancer, renal cancer, cancer of the respiratory system; sarcoma, skin cancer; stomach cancer, testicular cancer, thyroid cancer; uterine cancer, cancer of the urinary system, as well as other carcinomas and sarcomas.

### Embodiment 20

[0224] The costimulatory polypeptide according to any one of EMBODIMENT 1 to 10 or the oncolytic virus according to EMBODIMENT 14 for use in a method of treating cancer according to EMBODIMENT 19, wherein the cancer is a cold tumor or a hot tumor.

### Embodiment 21

[0225] A kit comprising a costimulatory polypeptide according to any one of EMBODIMENTS 1 to 10, or an oncolytic virus according to EMBODIMENT 14, optionally wherein the kit comprises further reagents.

### Embodiment 22

[0226] Use of an effective amount of costimulatory polypeptide according to any one of EMBODIMENTS 1 to 10, or use of an effective amount of oncolytic virus according to EMBODIMENT 14, in an in vitro method for stimulating 4-1BB expressing cells.

[0227] The present invention will now be further illustrated with the help of the following non-limiting Examples.

### EXAMPLES

### Example 1: Polypeptide Design and Expression of Polypeptides

[0228] Six different costimulatory polypeptides according to the invention were designed comprising either one or three 4-1 BBL domains according to SEQ ID NO: 1 or 4. For comparing these new polypeptides in functional assays with available 4-1 BBL agents, four polypeptides comprising an scFv from one of two fully human anti-4-1BB/CD137 agonist mAbs (MAb1 and MAb2) for comparison, and optionally a trimerization domain and a polypeptide comprising one 4-1BBL domain and a trimerization domain of chicken tenascin were analyzed and compared to the costimulatory polypeptides according to the invention. The domains of the polypeptides are listed in Table 1, a graphical representation can be found in the listed figures. It has to be noted that each position and each domain, tag, leader-sequence, linker-sequence or promotor sequence can be rearranged or interchanged for constructing a highly active costimulatory polypeptide.

TABLE 1
Domains present in costimulatory polypeptides according
to the invention and design of comparison polypeptides

| Polypeptide | SEQ ID | | | Effector | Trimerization | Graphical |
|---|---|---|---|---|---|---|
| Name | NO | Linker | Tags | domain | domain | representation |
| MAb1-scFv | | SEQ ID | His-Tag, | MAb1 scFv | — | FIG. 1A |
| (comparison 1) | | NO: 9 | Strep-Tag | | | |
| MAb1-scFv- | | SEQ ID | His-Tag, | MAb1 scFv | SEQ ID NO: 7 | FIG. 1A |
| Tri_{XVIII} | | NO: 9 | Strep-Tag | | | |
| (comparison 1) | | | | | | |
| MAb2-scFv | | SEQ ID | His-Tag, | MAb2 scFv | — | FIG. 2A |
| | | NO: 9 | Strep-Tag | | | |
| MAb2-scFv- | | SEQ ID | His-Tag, | MAb2 scFv | SEQ ID NO: 7 | FIG. 2A |
| Tri_{XVIII} | | NO: 9 | Strep-Tag | | | |
| (comparison 2) | | | | | | |
| s4-1BBL | 48 | SEQ ID | His-Tag, | 4-1BBL | — | FIG. 3A |
| | | NO: 9, 12 | Strep-Tag | (SEQ ID NO: 4) | | |
| s4-1BBL- | 54 | SEQ ID | His-Tag, | 4-1BBL | SEQ ID NO: 7 | FIG. 4A |
| Tri_{XVIII} | | NO: 9, 12 | Strep-Tag | (SEQ ID NO: 4) | | |
| s4-1BBL- | 72 | SEQ ID | His-Tag, | 4-1BBL | SEQ ID NO: 7 | FIG. 3A, |
| Tri_{XVIII}^{LL} | | NO: 9, 12, | Strep-Tag | (SEQ ID NO: 4) | | FIG. 4A, |
| | | 15 | | | | FIG. 5A, |
| s4-1BBL- | 52 | SEQ ID | His-Tag, | 4-1BBL | SEQ ID NO: 8 | FIG.: 4A |
| Tri_{XV} | | NO: 9, 12 | Strep-Tag | (SEQ ID NO: 4) | | |
| Triple-s4-1- | 6 | SEQ ID | His-Tag, | 4-1 BBL (x3) | — | FIG.: 5A |
| BBL | | NO: 9, 11, | Strep-Tag | (SEQ ID NO: 4) | | |
| | | 12 | | | | |
| Triple-s4- | 66 | SEQ ID | His-Tag, | 4-1 BBL (x3) | SEQ ID NO: 7 | FIG.: 5A |
| 1BBL-Tri_{XVIII} | | NO: 9, 11, | Strep-Tag | (SEQ ID NO: 4) | | |
| | | 12 | | | | |
| s4-1BBL-TNC | 86 | SEQ ID | | 4-1BBL | SEQ ID NO: 7 | FIG. 6A |
| (comparison 3) | | NO: | | (SEQ ID NO: 4) | | |
| s4-1BBL-short | 76 | SEQ ID | His-Tag, | 4-1BBL | SEQ ID NO: 7 | FIG.: 14A |
| (sh) minimal | | NO: 9 | Strep-Tag | minimum or | | Further (core) |
| polypeptide | | | | core sequence | | minimal |
| | | | | (SEQ ID NO: 1) | | constructs are |
| | | | | | | shown in FIG.: 15A |

1. Polypeptide Design and Gene Synthesis of Monomeric MAb1-Based Anti-4-1BB scFv

### a) MAb1

[0229] The protein sequence of MAb1, which binds 4-1 BB, was taken from the KEGG database. Afterwards, in silico design of a corresponding single-chain antibody (scFv) was conducted: To enable secretion of the scFv, a signal peptide derived from the human Igκ light chain (SEQ ID NO: 91) was added to the N-terminus of the protein sequence, followed by the variable domain of the heavy chain (VH) sequence of MAb1, a (G45)3-linker sequence (SEQ ID NO: 11), and the VL domain sequence of MAb1 for the MAb1-derived scFv. The protein sequence was back-to translated into its corresponding human codon-optimized DNA sequence. A synthesized sequence encoding MAb1-scFv was used to get two single chain fragment polypeptides, namely MAb1-scFv and MAb1-scFv-Tri_{XVIII}, which additionally contains a trimerization domain. MAb1-scFv was amplified via PCR. Thereby a sequence encoding a Strep-Tag and a HIS-Tag separated by a linker (SEQ ID NO: 9) were added at the C-terminus. Additionally, a BamHI restriction site was added separating the scFv from the Tags. Therefore, a first PCR was performed using the following primer pair: forward primer MAb1-F-HindIII (SEQ ID NO: 94) and the reverse primer MAb1-B1 (SEQ ID NO: 95). Using the resulting product as a template a second PCR was performed with the same forward and B2-NotI (SEQ ID NO: 96) as reverse primer. Sequences encoding the Strep-Tag and the His-Tag were thereby included in the PCR reverse primers and added via PCR. The product was cloned into a pCEP4 expression vector using HindIII and NotI restriction enzymes. At this step, it is possible to clone the resulting nucleic acid in any suitable expression vector for expression in a bacterial, plant and mammalian expression system. For the MAb1-scFv-Tri_{XVIII}, the trimerization domain had to be to added via PCR. In a first PCR the MAb1 part was amplified using the forward primer MAb1-F-HindIII (SEQ ID NO: 94) and the reverse primer MAb1-B (SEQ ID NO: 97. The trimerization part was amplified from the MAb2-Tri-scFv nucleic acid sequence (see below) with the following primer pair: MAb1-Tri-F (SEQ ID NO: 98) as forward primer and TriDom-B-BamHI (SEQ ID NO: 99) as reverse primer. The obtained two PCR product were then joined in a third PCR using the forward primer of the MAb1 part and the reverse primer of the trimerization part. The product was cloned into the pCEP4 expression vector using HindIII and BamHI restriction enzymes. Downstream of the BamHI site this vector already contains a Strep-Tag and a HIS-Tag sequence.

### b) MAb2

[0230] The protein sequence of MAb2 was taken from the KEGG database. Afterwards, in silico design of a corresponding single-chain antibody (scFv) was conducted. To enable secretion of the scFv, a signal peptide derived from the human Igκ light chain (SEQ ID NO: 91) was added to the N-terminus of the protein sequence, followed by the complementarity defining region (CDR) VH sequence of MAb2, a (G45)3-linker sequence (SEQ ID NO: 11) and the CDR VL region sequence of MAb2 for the MAb2-derived scFv. The protein sequence was back-translated into its corresponding human codon-optimized DNA sequence. The PCR for cloning and amplification was conducted similarly to a) with the primers listed in SEQ ID NOs: 113 and 99, respectively.

c) s4-1BBL, s4-1BBL-Tri_{XVIII}, s4-1BBL-Tri_{XVIII} and s4-1BBL-Tri_{XV}

[0231] An expression plasmid encoding human 4-1BBL (Kober et al., Eur J Immunol. 2008 October; 38(10): 2678-2688) was used to generate two PCR-products encoding soluble (s) 4-1BBL proteins, namely s4-1 BBL and s4-1BBL-Tri_{XVIII}^{LL}, which both contain a CD5 Leader sequence followed by a Strep-Tag and a HIS-Tag sequence, separated by a GGSGG linker upstream of the extracellular part of 4-1 BBL (SEQ ID NO: 4). s4-1BBL-Tri_{XVIII}^{LL} additionally harbours the same trimerization domain that has been used for trimerization of MAb1-scFy and MAb2-scFv between the Tag sequences and the 4-1 BBL extracellular region. The trimerization domain is separated from the tags by a long 25mer linker. In order to amplify 4-1BBL, the following primers were used: Tags-4-1BBL-F1 (SEQ ID NO: 102) as forward primer and 4-18B-L-B-NotI (SEQ ID NO: 103) as reverse primer. Using the obtained product as a template, a second PCR was performed with the same reverse primer, but the following forward primer: CD5L-Tags-F2-HindIII (SEQ ID NO: 104). For the 4-1BBL-Tri_{XVIII}^{LL}, the trimerization domain had to be added via PCR. At first two PCR reactions had to be performed. The trimerization domain was amplified using the MAb2-Tri_{XVIII}-scFv as a template and the following primers: Tags-TriDom-F1 (SEQ ID NO: 105) as forward and TriDom-4-18B-L-B (SEQ ID NO: 106) as reverse primer. The 4-1BBL part was amplified using an already cloned 4-1BBL sequence as a template and the following primers: forward, TriDom-4-1BB-L-F (SEQ ID NO: 107) and 4-18B-L-B-NotI (SEQ ID NO: 103) as reverse primer. The obtained two PCR products were then joined in a third PCR using the CD5L-Tags-F2-HindIII (SEQ ID NO: 104) and the 4-18B-L-B-NotI (SEQ ID NO: 103) primers. For s4-1BBL-Tri_{XVIII}, the 25mer linker (SEQ ID NO: 15) was exchanged with a shorter linker sequence according to SEQ ID NO: 9. For s4-1BBL-Tri_{XV}, the trimerization domain was exchanged with a domain according to SEQ ID NO: 8. All four products (4-1BBL and 4-1BBL-Tri_{XVIII}^{LL}) were cloned into the pCEP4 expression vector using HindIII and NotI restriction enzymes.

d) Triple-s4-1BBL and Triple-s4-1BBL-Tri_{XVIII}^{LL}

[0232] The polypeptide is based on the protein sequence of 4-1BBL (SEQ ID NO: 4) with the addition of different linker sequences (SEQ ID NOs: 9, 10 and 15) and a Strep- and His-Tag. The Triple-s4-1BBL-Tri_{XVIII} polypeptide additionally comprises a trimerization domain according to SEQ ID NO: 7. The full-length polypeptide has a sequence according to SEQ ID NO: 64 (Triple-s4-1BBL) or SEQ ID NO: 74 (Triple-s4-1BBL-Tri_{XVIII}^{LL}).

[0233] Synthesized sequences encoding human Triple-s4-1 BBL and Triple-54-1BBL-Tri_{XVIII}^{LL} were amplified via PCR using the following primer pair: Triple-s4-1BBL-F-HindIII (SEQ ID NO: 108) as forward primer and Triple-s4-1BBL-B-NotI (SEQ ID NO: 109) as reverse primer. Triple-s4-1BBL (SEQ ID NO: 64) and Triple-s4-1BBL-Tri_{XVIII}^{LL} (SEQ ID NO: 74) were cloned into the pCEP4 expression vector using HindIII and NotI restriction enzymes.

e) s4-1BBL-TNC

[0234] Another comparison example is the polypeptide of s4-1BBL with a trimerization domain of chicken tenascin (TNC).

[0235] An expression plasmid encoding human s4-1BBL-Tri_{XVIII}^{LL} was used to generate the PCR-product encoding soluble (s) 4-1BBL-TNC protein, which contains a CD5 Leader sequence followed by a Strep-Tag and a HIS-Tag sequence, separated by a GGSGG linker, upstream of the extracellular part of 4-1BBL (SEQ ID NO:4). Between the Tag sequences and the 4-1BBL extracellular region lies the trimerization domain chicken tenascin-C(SEQ ID NO: 110). In order to generate s4-1 BBL-TNC two PCR reactions had to be performed using s4-1BBL-Tri_{XVIII}^{LL} as a template and the following primers: in the first step CD5L-Tags-F2-HindII (SEQ ID NO: 104) is used as forward primer and Tags-TNC-B (SEQ ID NO: 111) is used as reverse primer. In the second PCR, Tags-TNC-F (SEQ ID NO: 112) is used as forward primer and 4-1BBL-B-NotI (SEQ ID NO: 103) is used as reverse primer. The obtained two PCR products were then joined in a third PCR using the CD5L-Tags-F2-HindIII and the 4-1BBL-B-NotI primer pair (SEQ ID NOs: 104 and 103). s4-1BBL-TNC was cloned into the pCEP4 expression vector using HindIII and NotI restriction enzymes, the nucleic acid sequence corresponds to SEQ ID NO: 83.

### 2. Expression of Polypeptides

[0236] All expression plasmids listed above were transfected into HEK293T cells and were cultivated under conditions suitable for the expression of polypeptides. The expression system can be exchanged to any suitable expression system, such as bacterial, yeast, plant (including algae), insect cell-derived expression systems, or mammalian expression systems, including, for example, CHO, HEK293(T), HeLa, COS, Vero, NS0, U2OS, A549, HT1080, CAD, P19, NIH 3T3, L929, N2a, MCF-7, Y79, SO-Rb50, Hep G2, DUKX-X11, J558L, BHK, and Sp2/0 cells and their derivatives. For a survey, reference is made to Khan, Adv. Pharm. Bull., 2013, 3(2):257-263.

[0237] The cells were then harvested, and the supernatants were taken for subsequent analysis. Similar protocols are available for intracellular expression in various systems. Polypeptides having a leader sequence (e.g., SEQ ID NO: 17) being compatible with a eukaryotic host cell of interest may be strongly preferred in case the relevant leader allows proper intracellular trafficking and secretion of the properly folded protein. Even though certain polypeptides as disclosed herein are perfectly suitable for expression in bacterial hosts, it may be favourable to express soluble and correctly folded proteins in eukaryotic cells to have full functionality. Generally, intracellular expression in bacteria and/or refolding of inclusion bodies may have certain drawbacks in case a eukaryotic, and particularly human, protein sequence to be expressed comprises glycosylation sites, which cannot be properly glycosylated in the bacterial host leading to less functional proteins upon bacterial expression. In view of the fact that the 4-1BBL polypeptides as designed do not comprise cysteine residues, inclusion body formation can be avoided (when choosing a production in the bacterial cytoplasm, not the periplasm), another frequently encountered problem during cytoplasmic expression in bacteria and subsequent refolding to re-gain activity of a protein of interest.

### Example 2: Binding Assays

[0238] For testing the resulting supernatants, a Triple parameter reporter cell line (TPR) based on the human Jurkat JE6-1 T cell line was used (Jutz et al., 2016). This cell line harbors fluorescent reporter polypeptides to concomitantly assess the activity of three transcription factors, which play major roles during T cell activation: NF-κB::eCFP; NFAT::eGFP and AP-1::mCherry. The TPR reporter cells were transduced to stably express human 4-1BB. For the binding assays, 1×10⁵ 4-1 BB expressing cells in a volume of 10 μl were incubated with 50 μl of the supernatants containing the products according to Table 1. As controls, cells that do not express 4-1BB, and a control-scFv were used. After an incubation time of 30 min at 4° C., the samples are washed in FACS-Buffer (1×PBS, 0.5% FCS, 0.005% NaN₃) and stained with a biotinylated Strep-tag II mAb (GenScript, NJ) via adding 5 μl of a 1:150 dilution to each sample and incubation for 20 min on 4° C. Afterwards, samples were washed again and incubated for another 20 min on 4° C. upon adding 5 μl of a 1:200 dilution of Streptavidin-PE (BD Pharmingen, San Diego, CA) to each sample. At last, samples were washed again and subsequently measured via flow cytometry, which was performed on a FACSCalibur flow cytometer (Becton Dickinson Immunocytometry System, San Jose, CA), using the CellQuest software. Data was analyzed with FlowJo (version 10.0.7, Tree Star, Ashland, OR) and Graphpad Prism (version 6, GraphPad Software, Inc., La Jolla, CA). The following results were obtained:

### 1. MAb1-scFV and MAb2 ScFv

[0239] The binding of MAb1-scFV is shown in FIG. 1C. By performing flow cytometry based binding studies, a specific binding of MAb1-scFv or MAb1-Tri_{XVIII}-scFv to 4-1BB-expressing cells could be confirmed, whereas these antibody fragments did not bind to control cells not expressing 4-1BB. The binding was dose-dependent and still detectable when using a 1:1600 dilution of both supernatants. A control single chain fragment (in this case Pembrolizumab-scFv), which was used as an additional control did not bind to 4-1BB-expressing cells and to the control cells.

[0240] The binding of MAb2-scFV is shown in FIG. 2B. By performing flow cytometry based binding studies, a specific binding of MAb2-scFv or MAb2-scFv-Tri_{XVIII} to 4-1BB-expressing cells was not detected. Furthermore, MAb2-scFv and MAb2-scFv-Tri_{XVIII} could not be detected in Western blot analysis, whereas the Ctrl-scFv (MAb1-scFv and MAb1-Tri_{XVIII}-scFv) could be seen as strong bands, which shows the Western blot to be working.

2. s4-1BBL and s4-1BBL-Tri_{XVIII}^{LL}

[0241] The binding of s4-1BBL and s4-1BBL-Tri_{XVIII}^{LL} can be seen in FIG. 3B. By performing flow cytometry based binding studies, a specific binding of s4-1BBL or s4-1BBL-Tri_{XVIII}^{LL} to 4-1BB-expressing cells could be confirmed, whereas these soluble proteins did not bind to control cells not expressing 4-1BB. The binding was dose-dependent and still detectable when using a 1:1600 dilution of both supernatants. A control protein that contains a Strep-Tag sequence (in this case Pembrolizumab-scFv), which was used as an additional control, did not bind to 4-1BB-expressing cells and to the control cells.

3. s4-1BBL-Tri_{XVIII}^{LL}, s4-1BBL-Tri_{XVIII} and s4-1BBL-Tri_{XV}

[0242] The binding of s4-1BBL-Tri_{XVIII}^{LL}, 54-1BBL-Tri_{XVIII} and s4-1BBL-Tri_{XV} can be seen in FIG. 4B. By performing flow cytometry based binding studies, a specific binding of all three trimerized s4-1 BBL polypeptides could be confirmed, whereas these soluble proteins did not bind to control cells not expressing 4-1BB. The binding was dose-dependent for all three trimerized s4-1BBL proteins, but s4-1BBL-Tri_{XV} showed by far the weakest binding that decreased fast and was not detectable anymore at a dilution of 1:512. The binding capacities of s4-1BBL-Tri_{XVIII}^{LL} and s4-1BBL-Tri_{XVIII} were very similar and both still detectable at a dilution of 1:4096.

4. Triple-s4-1BBL and Triple-s4-1BBL-Tri_{XVIII}^{LL}

[0243] The binding of Triple-s4-1BBL and Triple-s4-1BBL-Tri_{XVIII}^{LL} can be seen in FIG. 5B. By performing flow cytometry based binding studies, a specific binding of Triple-s4-1BBL and Triple-s4-1BBL-Tri_{XVIII}^{LL} to 4-1BB-expressing cells could be confirmed, whereas these soluble proteins did not bind to control cells not expressing 4-1BB. The binding was dose-dependent for all three trimerized s4-1BBL proteins, but Triple-s4-1BBL-Tri_{XVIII}^{LL} showed by far the weakest binding that decreased quickly and was not detectable at a dilution of 1:256. The polypeptide s4-1BBL-Tri_{XVIII}^{LL} still showed the highest binding capacity even though Triple-s4-1BBL binding was still detectable at a 1:4096 dilution of the supernatant.

5. s4-1BBL-TNC

[0244] The results of s4-1BBL-TNC binding are shown in FIG. 6B. For a better comparison of binding capacity, previously used s4-1BBL-Tri_{XVIII}^{LL} was included in the analysis. By performing flow cytometry based binding studies, a specific binding of s4-1BBL-TNC to 4-1BB-expressing cells could be confirmed, whereas these soluble proteins did not bind to control cells not expressing 4-1BB. The binding was dose-dependent and still detectable when using a 1:128 dilution of the supernatant. Nevertheless, the binding capacity was much lower than for the comparison polypeptide s4-1BBL-Tri_{XVIII}^{LL}, which showed specific binding down to a dilution of 1:4096.

[0245] All polypeptides of the present invention had superior performance compared to antibody-based polypeptides as available. Additionally, the specific polypeptide design allows the provision of concise and versatile polypeptides, which can be designed in a way completely avoiding the need of non-human sequences to reduce the risk of side effects during therapeutic applications.

### Example 3: Functional Assay

[0246] For functional assays, T cell stimulator cells (abbreviated as “TCS”) were used to activate the reporter cells. TCS are a murine thymoma cell line (BW5147) engineered to stably express a membrane bound anti-human CD3 single chain fragment (anti-CD3-scFv) that delivers signal to one to T cell reporter cells (abbreviation for: TCS-Ctrl) (Leitner et al., 2010). In addition, TCS transduced to express 4-1BBL (TCS-4-1BBL), were used to co-deliver signal one and a co-stimulatory signal to the 4-1BB-expressing reporter cells. This stimulatory effect of 4-1BB can then be easily measured via flow cytometry through an enhanced expression of the NF-κB-reporter gene eCFP, which was mainly used as read-out for 4-1BB signaling. The expression levels of 4-1 BB on Jurkat reporter cells and the expression of 4-1BBL and anti-CD3-scFv on TCS cells were confirmed using the following antibodies: 4-1BB-PE (4B4-1), 4-1BBL-PE (5F4) (both from Biolegend, San Diego, CA) and a DyLight-649-conjugated goat-anti-mouse IgG(H-FL) antibody (Jackson ImmunoResearch, West Grove, PA) for anti-CD3 single chain fragment detection.

[0247] 5×10⁴ 4-1BB-expressing and control T cell reporter cells were incubated with 2×10⁴ TCS-Ctrl or TCS-4-1BBL. The supernatants comprising the expressed polypeptides (as positive control an agonistic 4-1BB antibody (MAb2) was used at a concentration of 1 μg/ml) were added to the reporter cells that were stimulated with TCS-Ctrl in different concentrations. For this, 96-well flat bottom plates were used with an end volume of 100 μl. After a 24 hours incubation time NF-κB activation was measured through eCFP expression via flow cytometry. For analysis, TCS cells were excluded by using an APC-conjugated mouse CD45.2 antibody (Biolegend, San Diego, CA) and gating on the APC-negative cell population. Flow cytometry was performed on a FACSFortessa flow cytometer (Becton Dickinson Immunocytometry System, San Jose, CA), using the FACSDiva software. Data was analyzed with FlowJo (version 10.0.7, Tree Star, Ashland, OR) and GraphPad Prism (version 6, GraphPad Software, Inc., La Jolla, CA). The following results were obtained:

### 1. MAb1-scFV and MAb2 ScFv

[0248] The results of the functional assay with the supernatants containing MAb1-scFv and MAb2-scFv are shown in FIGS. 1D and 2C, respectively. Functional assays, using MAb1-scFv and MAb1-Tri_{XVIII}-scFv supernatants on 4-1BB-expressing reporter cells in addition to TCS-Ctrl, revealed a rather weak capacity of both to functionally activate 4-1BB induced stimulation. Compared to supernatants containing MAb1-scFv the stimulatory capacity of supernatants containing MAb1-Tri_{XVIII}-scFv was stronger. The stimulatory capacity of both supernatants was highest at a final dilution of 1:4. By contrast adding MAb2-scFv or MAb2-scFv-Tri_{XVIII} in supernatants derived from cells transfected with plasmids encoding MAb2-scFv or MAb2-scFv-Tri_{XVIII} to 4-1 BB-expressing reporter cells in addition to TCS-Ctrl did not lead to a further stimulation, whereas TCS-4-1 BBL was able to enhance NF-κB activation approx. 2.5-fold. As an additional positive control MAb2 (Creative Biolabs, NY) was used, which also enhanced NF-κB activation approx. 1.5-fold. As already stated under Example 2.1, no bands were detected for MAb2 in the Western Blot which correlates with the finding that no functional binding of the MAb2-scFv polypeptides could be confirmed.

2. s4-1BBL and s4-1BBL-Tri_{XVII}

[0249] The results of the functional assay with the supernatants containing s4-1BBL and s4-1BBL-Tri_{XVIII}^{LL} are shown in FIG. 3C. Functional assays, using s4-1BBL or s4-1BBL-TriTri_{XVIII}^{LL} supernatants on 4-1 BB-expressing reporter cells in addition to TCS-Ctrl, revealed a strong capacity for activating 4-1BB-expressing reporter cells. In particular, the trimerized s4-1BBL was able to functionally activate 4-1 BB-induced stimulation. Compared to supernatants containing MAb1-scFv the stimulatory capacity of supernatants containing s4-1BBL-TriTri_{XVIII}^{LL} was much stronger. The stimulatory capacity of s4-1BBL-TriTri_{XVIII}^{LL} supernatant was still detectable at a final dilution of 1:64, whereas the stimulatory capacity of s4-1BBL supernatant was already very weak, but still detectable, at a final dilution of 1:8.

3. s4-1BBL-Tri_{XVIIILL}, s4-1BBL-Tri_{XVIII} and s4-1BBL-Tri_{XV}

[0250] The results of the functional assay with the supernatants containing s4-1BBL-Tri_{XVIII}^{LL}, s4-1BBL-Tri_{XVIII} and s4-1BBL-Tri_{XV} are shown in FIG. 4C. Functional assays, using s4-1BBL-Tri_{xVIII}^{LL}, s4-1BBL-Tri_{XVIII} and s4-1BBL-Tri_{XV} supernatants on 4-1BB-expressing reporter cells in addition to TCS-Ctrl, revealed a very good capacity of all three supernatants to functionally activate 4-1BB induced stimulation. Nonetheless, 54-1BBL-TriTri_{XVIII}^{LL} and 54-1BBL-Tri_{XVIII} showed a weaker but more stable activation, whereas s4-1BBL-Tri_{XV} induced a stronger activation that wore off faster.

4. Triple-s4-1BBL and Triple-s4-1BBL-Tri_{XVIII}^{LL}

[0251] The results of the functional assay with the supernatants containing Triple-s4-1 BBL and Triple-s4-1BBL-Tri_{XVIII}^{LL} are shown in FIG. 5C. For comparison purposes, the functional data were generated with s4-1BBL-TriXV_{III}^{LL} as comparator. Functional assays, using s4-1BBL-Tri_{XVIII}^{LL}, Triple-s4-1 BBL or Triple-s4-1BBL-Tri_{XVIII}^{LL} supernatants on 4-1 BB-expressing reporter cells in to addition to TCS-Ctrl, revealed a relatively weak capacity of Triple-s4-1BBL to functionally activate 4-1BB induced stimulation. Triple-s4-1BBL-TriTri_{XVIII}^{LL}, on the other hand, showed a stimulatory capacity comparable to s4-1BBL-Tri_{XVIII}^{LL}, but the effect wore off slightly faster.

5. s4-1BBL-TNC

[0252] The results of the functional assay with the supernatants containing s4-1BBL-TNC in comparison with s4-1BBL-TriTri_{XVIII}^{LL} are shown in FIG. 6C. Functional assays, using s4-1BBL-TNC or s4-1BBL-Tri_{XVIII}^{LL} supernatants on 4-1 BB-expressing reporter cells in addition to TCS-Ctrl, revealed an acceptable capacity of s4-1 BBL-TNC to functionally activate 4-1BB induced stimulation. Nonetheless, compared to supernatants containing s4-1BBL-TriTri_{XVIII}^{LL} the stimulatory capacity of s4-1BBL-TNC was, even though comparable in higher concentrations, much weaker at lower concentrations. Whereas s4-1BBL-Tri_{XVIII}^{LL} was still at highest stimulatory capacity at a dilution of 1:8, s4-1BBL-TNC at the same concentration already lost about 50% of its effect.

### Example 4

[0253] Two of the polypeptides expressed in the vector pCEP4 of Examples 1 to 3 were cloned into a measles vector for obtaining an oncolytic virus with either MAb1-scFy as payload or s4-1BBL-Tri_{XVIII}^{LL}. A schematic representation of the measles vector and the position of the functional polypeptide can be seen in FIG. 7.

### 1. MAb1-scFv in Measles Vector

[0254] The sequence of the monomeric MAb1-based anti-4-1BB scFv was subcloned into vector pc3MerV2Id via Mlul restriction sites. The pc3MerV2Id vector contains an additional transcription unit before the N protein of the Schwarz MV genome (Noll et al., 2013, Int J Oncol. 2013 July; 43(1):103-12). The generated plasmid was subjected to insert-sequencing using classical Sanger DNA sequencing services. A plasmid with the correct insert in correct orientation and free of mutations was used for virus rescue.

[0255] The virus rescue, in the present case, was conducted in Vero cells that were co-transfected with the scFv-based pc3MerV2Id vector and plasmids that lead to production of the measles virus proteins N, P, and L. This results in the formation of infectious measles virus particles that encode the MAb1-based anti-4-1BB scFv, which can be further isolated, purified, and produced (see WO2012/022495).

2. s4-1BBL-Tri_{XVIII}^{LL} in measles vector

[0256] The nucleic acid sequence of the s4-1BBL-Tri_{XVIII}^{LL} polypeptide (SEQ ID NO: 73) was subcloned into vector pc3MerV2Id via Mlul restriction sites. The pc3MerV2Id vector contains an additional transcription unit before the N protein of the Schwarz MV genome (Noll et al., 2013, supra). The generated plasmid was subjected to insert-sequencing using classical Sanger DNA sequencing services. A plasmid with the correct insert in correct orientation and free of mutations was used for virus rescue.

s4-1BBL-Tri_{XVIII}^{LL} Expressing MV (MV-A):

[0257] The nucleic acid sequence of the s4-1BBL-Tri_{XVIII}^{LL} polypeptide (SEQ ID 59) was subcloned into the MV Schwarz encoding CMV3-ATU vector between the open reading frames for measles virus H and L proteins, via BsiI and BssHII restriction sites. The generated plasmid was subjected to insert-sequencing using classical Sanger DNA sequencing services. A plasmid with the correct insert and free of mutations was used for virus rescue.

s4-1BBL-Tri_{XVIII} Expressing MV (MV-B):

[0258] A codon optimized nucleic acid sequence of the s4-1BBL-Tr_{iXVIII} polypeptide (of SEQ ID 58) was subcloned into the MV Schwarz encoding CMV3-ATU vector between the open reading frames for measles virus H and L proteins via BsiI and BssHII restriction sites. The generated plasm id was subjected to insert-sequencing using classical Sanger DNA sequencing services. A plasmid with the correct insert and free of mutations was used for virus rescue.

ms4-1BBL-Tri_{XVIII} (MV-C)

[0259] The nucleic acid sequence of the murine 54-1BBL-Tri_{XVIII} polypeptide (SEQ ID 140) was subcloned into the MV Schwarz encoding CMV3-ATU vector between the open reading frames for measles virus H and L proteins BsiI and BssHII restriction sites. The generated plasmid was subjected to insert-sequencing using classical Sanger DNA sequencing services. A plasm id with the correct insert and free of mutations was used for virus rescue.

### Example 5: OV Cell Culture Supernatants in Binding and Functional Assays

[0260] OV cell culture supernatants and/or supernatants from transfected HEK293 cells can be used to stimulate primary cells, wherein stimulation may be confirmed by measuring cytokine secretion, or by performing proliferation assays. As subsequent step, an in vivo confirmation in humanized mouse models (alternative: mouse-specific polypeptides) can be performed. Depending on the nature of the OV of interest, other animal models and/or even prokaryotic test systems can be used.

### Example 6

[0261] The costimulatory polypeptide of the present invention can be used in different OV backbones as payload. For evaluating the general applicability, other established OV backbones were considered for testing. To this end, certain costimulatory polypeptide polypeptides of the present invention can be inserted into an adenovirus backbone to have another well-established OV suitable for therapeutic purposes as cargo for the costimulatory 4-1BBL polypeptides as relevant payload. Exemplary nucleic acid sequences encoding such polypeptides are shown in SEQ ID NOs: 23, 27, 33, 38, 45, 46, 85, 115 and 119. Similar combinations of an OV and the polypeptides of the present invention can be designed for an OV of interest based on the teaching on the costimulatory polypeptides of this invention to obtain an expanded panel of OVs for increasing the therapeutic scope.

### Example 7: Costimulatory Capacity of Supernatants Derived from Cells Infected with Measles Vectors Encoding 4-1BBL

[0262] For functional assays, 5×10⁴ human 4-1BB-expressing and control T cell reporter cells were incubated with 2×10⁴ TCS-Ctrl and different dilutions of culture supernatants derived from cells infected with measles virus strains encoding soluble 4-1 BBL with trimerization domains s4-1BBL_{TRiXVIII} (encoded by MV-B (SEQ ID NO: 125)) or s4-1BBL_{TRiXVIII}^{LL} (encoded by MV-A (SEQ ID NO: 124)). The codon optimized insert of MV-B is shown in SEQ ID NO: 141. The polypeptides are depicted schematically in FIG. 8A. As a positive control 4-1BB-expressing reporter cells were treated with TCS-4-1BBL and MAb-2, respectively (FIGS. 8 B, C and D). 96-well flat bottom plates were used with an end volume of 100 μl and after a 24 h incubation NF-κB activation was measured through eCFP expression via flow cytometry. For analysis, TCS cells were excluded by using an APC-conjugated mouse CD45.2 antibody (#104, Biolegend, San Diego, CA) and gating on the APC-negative cell population. Flow cytometry was performed on a FACSFortessa flow cytometer (Becton Dickinson Immunocytometry System, San Jose, CA), using the FACSDiva software. Data was analyzed with FlowJo (version 10.0.7, Tree Star, Ashland, OR) and Graphpad Prism (version 6, GraphPad Software, Inc., La Jolla, CA).

[0263] By performing functional assays using human 4-1BB expressing reporter cells in combination with TCS-Ctrl and soluble proteins, a dose-dependent activation of 4-1BB was observed for supernatants of both measles virus vectors MV-A and MV-B (FIGS. 8C and D). The supernatant of MV-B infected cells showed a strong capacity to activate NF-κB in the 4-1BB reporter cells. A basal level of NF-κB was still not reached even when administering MV-B at a dilution of 1/125. These data show that measles vectors can be engineered to deliver payloads that have the capacity to enhance T cell and NK cell responses via 4-1BB co-stimulation.

### Example 8: Functional Evaluation of 54-1BBL-Tri_{XVIII} in Human PBMCs

[0264] The study with primary human cells was approved by the ethics committee of the Medical University of Vienna (EK Nr: 1936/2020). Heparinized whole blood of healthy volunteer donors was purchased from the department of the blood serology and transfusion medicine of the main hospital (AKH, Vienna). Peripheral blood mononuclear cells (PBMCs) were isolated by standard density-gradient centrifugation with Lymphoprep (Axis-Shield PoC AS, Oslo, Norway).

[0265] Isolated PBMCs were labelled with CFSE solution as previously described (Stecher et al., 2017). In brief, 10×10⁶ PBMCs in 1 mL 1×PBS were incubated with 1 μl of CFSE solution for 4 min at RT and then washed with 1×PBS. CFSE-labelled PBMCs (1×10⁵/well) were then co-cultured with 300 ng/ml of soluble human anti-CD3 (OKT3) and different dilutions of s4-1 BBL-Tri_{XVIII} or 1 μg/ml MAb-2 in a 96-well round bottom plate for 4-5 days. s4-1BBL-Tri_{XVIII} was to generated as previously described, by transfecting HEK293T cells and collecting the supernatant containing the soluble protein after 48 to 72 h. As control, supernatant from non-transfected HEK293T cells was added to CFSE-labelled PBMCs. In addition, CFSE-labelled PBMCs were co-cultured with soluble OKT3 or soluble human anti-CD3 (UCHT1) at different concentrations (300 ng/ml, 30 ng/ml, 3 ng/ml, 300 μg/ml and 30 μg/ml) in combination with 1 μg/ml MAb-2 or soluble s4-1 BBL-Tri_{XVIII}. Cells were kept in RPMI1640 supplemented with 10% FBS, penicillin (100 U/mL) and streptomycin (100 μg/mL) (from Sigma Aldrich, St. Louis, MO). After 4-5 days, PBMCs were harvested and stained for CD4-BV421 (A161A1), CD8-PerCP (SK1) and CD25-Pe-cyanine7 (BC96) (all from Biolegend, San Diego, CA). Flow cytometry was performed on a FACSFortessa flow cytometer (Becton Dickinson Immunocytometry System, San Jose, CA), using the FACSDiva software. Data was analyzed with FlowJo (version 10.0.7, Tree Star, Ashland, OR) and Graphpad Prism (version 6, GraphPad Software, Inc., La Jolla, CA).

[0266] In addition, PBMC culture supernatants were harvested after 4-5 days of coculture and stored at −20° C., followed by Luminex multiplex cytokine analysis (System 100, Luminex Inc.). The concentration of IFN-γ, GMCSF, IL-13, and TNF-α was measured according to the manufacturer's instructions.

[0267] Isolated PBMCs were labelled with CFSE solution as previously described (Stecher et al., 2017). In brief, 10×10⁶ PBMCs in 1 mL 1×PBS were incubated with 1 μl of CFSE solution for 4 min at RT and afterwards washed with 1×PBS. CFSE-labelled PBMCs (1×10⁵/well) were then co-cultured with 3 ng/ml of soluble human anti-CD3 (UCHT1) and different dilutions of s4-1BBL-Tri_{XVIII} or 1 μg/ml MAb-2 in a 96-well round bottom plate for 4-5 days. s4-1BBL-Tri_{XVIII} was generated as previously described, by transfecting HEK293T cells and collecting the supernatant containing the soluble protein after 48 to 72 h. As a control, supernatant from non-transfected HEK293T cells was added to CFSE-labelled PBMCs. Cells were kept in RPMI1640 supplemented with 10% FBS, penicillin (100 U/mL) and streptomycin (100 μg/mL) (from Sigma Aldrich, St. Louis, MO). After 4-5 days, PBMCs were harvested and stained for CD4-BV421 (A161A1), CD8-PerCP (SK1), CD56-PE (5.1H11) and CD25-Pe-cyanine7 (BC96) (all from Biolegend, San Diego, CA). Flow cytometry was performed on a FACSFortessa flow cytometer (Becton Dickinson Immunocytometry System, San Jose, CA), using the FACSDiva software. Data was analyzed with FlowJo (version 10.0.7, Tree Star, Ashland, OR) and Graphpad Prism to (version 6, GraphPad Software, Inc., La Jolla, CA).

[0268] A construct encoding human s4-1BBL-Tri_{XVIII} was cloned into vector pCEP4 (Thermo Fisher Scientific, Waltham, MA). Transient expression was performed under 2% FCS full RPMI medium in HEK293 cells. Transfection of the pCEP4 vector into HEK293 cell (1×10⁶/ml) was performed using the calcium-phosphate method. At Day 3, supernatants were harvested and dialyzed extensively against 50 mM Na-Phosphate pH8.0, 150 mM NaCl prior to NiNTA Resin purification. Supernatant was passed over the equilibrated column, followed by washing with Na-Phosphate pH 7.4, 150 mM NaCl, 30 mM and 100 mM imidazole to remove FCS. Purified protein was then eluted in Na-Phosphate pH7.4, 150 mM NaCl, 600 mM Imidazole. Fractions of 1 mL were collected and analyzed by Coomassie staining. Pure, high-protein fractions were pooled and dialyzed against Na-Phosphate pH7.4, 150 mM NaCl for Imidazole removal.

[0269] CFSE-labelled PBMCs were co-cultured with soluble anti-human CD3 (OKT3) in combination with different dilutions of s4-1BBL-Tri_{XVIII} or MAb-2 to evaluate the capacity to activate human T cells and induce proliferation. Stimulation of PBMCs with s4-1BBL-Tri_{XVIII} resulted in higher percentages of CFSE^{low} T cells in the CD4 and CD8 subsets (FIGS. 9A and B). A dose-dependent effect of T cell proliferation was observed for CD4 and CD8 T cells, which was comparable to the condition with 1 μg/ml MAb-2. Cell culture supernatant of non-transfected HEK293T cells served as a control and did not affect T cell proliferation. As an activation marker, CD25 expression was analyzed by gating on live CD4 and CD8 T cell subsets. A dose-dependent upregulation of CD25 expression in the CD4 and CD8 T cell subsets was observed over the 4-5 days duration of the experiment (FIGS. 9C and D). The highest CD25 expression was observed upon addition of 54-1BBL-Tri_{XVIII} containing culture supernatants at a final dilution of 1/8, while the supernatant of non-transfected HEK293 cells did not show an effect on T cell proliferation.

[0270] In order to analyze the effect of 54-1BBL-Tri_{XVIII} on cytokine expression, Luminex™-based multiplexing was performed with the cell culture supernatants of PBMCs stimulation. Analysis of GMCSF, TNF-α, IFN-γ and IL-13 showed enhanced cytokine production in a dose-dependent manner when PBMCs were cocultured with soluble 4-1 BBL ectodomain containing protein (FIGS. 10A and B). Similar effects were observed upon coculture with MAb-2, even though some differences were observed. The most pronounced effects of 54-1BBL-Tri_{XVIII} were detected for IFN-γ production, which was much stronger compared to levels that were obtained to after coculture with MAb-2. On the contrary, for GM-CSF levels were somewhat higher after coculture with MAb-2 compared to the effects obtained after coculture with s4-1BBL-Tri_{XVIII}. Supernatant of non-transfected HEK293 cells did not influence GMCSF, TNF-α, IFN-γ and IL-13 cytokine production. High levels of IFN-γ induces apoptosis of cancer cells and is believed to contribute to activating cellular immunity and stimulation of anti-tumor responses (Jorgovanovic D, et al. Roles of IFN-γ in tumor progression and regression: a review. Biomark Res. 2020 Sep. 29; 8:49.; Song M et al. Low-dose IFN-γ induces tumor cell stemness in tumor microenvironment of non-small cell lung cancer. Cancer Res. 2019; 81771781:1-29).

[0271] In addition, OKT3 (Ortho Pharmaceutical, Raritan, NJ) was compared to another anti-CD3 antibody UCHT1 (BioLegend; Ultra-LEAF purified anti-human CD3 antibody). Both antibodies were titrated in different concentrations (300 ng/ml to 30 μg/ml) to CFSE-labelled PBMCs in combination with MAb-2 or supernatant containing soluble 4-1BBL-Tri_{XVIII}. These preliminary data show that the strongest effect of soluble 4-1BBL-Tri_{XVIII} was obtained at a concentration of 3 ng/ml of UCHT1 (FIGS. 11A (OKT3) and B (UCHT1)).

[0272] Thus, CFSE-labelled PBMCs were then co-cultured with 3 ng/ml of soluble anti-human CD3 (UCHT1) in combination with different dilutions of s4-1BBL-Tri_{XVIII} or MAb-2 to evaluate the capacity to activate human T cells and induce proliferation. Stimulation of PBMCs with s4-1BBL-Tri_{XVIII} resulted in higher percentages of CFSE_{low} T cells in the CD4 and CD8 subsets (FIG. 12A). A dose-dependent effect of T cell proliferation was observed for CD4 and CD8 T cells. Cell culture supernatant of non-transfected HEK293T cells served as control and did not affect T cell proliferation. In addition, CD25 expression was analyzed and dose-dependent upregulation of CD25 expression in the CD4 and CD8 T cell subsets was observed over the time course of the experiment (FIG. 12B).

[0273] Finally, CFSE-labelled PBMCs were cocultured with 3 ng/ml soluble anti-human CD3 (UCHT1) and purified s4-1BBL-Tri_{XVIII} in different final concentrations of 10 μg/ml, 3 μg/ml, 1 μg/ml, 300 ng/ml, 100 ng/ml, 30 ng/ml and 10 ng/ml or MAb-2. Stimulation of PBMCs with purified s4-1BBL-Tri_{XVIII} resulted in dose-dependent proliferation (high CFSE^{low} percentages) in the CD4 and CD8 T cell subsets as well as in the NK cell population (FIG. 13A). Furthermore, a dose-dependent effect was observed for activation marker CD25 by analyzing the different cell populations (CD4, CD8 and CD56) as shown in FIG. 13B.

[0274] PBMC responses to anti-CD3 stimulation showed variability among donors, and the effect of 4-1BB stimulation also varied between PBMC-samples obtained from different donors. Nevertheless, both culture supernatants containing s4-1BBL-Tri_{XVIII} and purified 4-1BBL-Tri_{XVIII} showed high potency for enhancing proliferation and CD25 upregulation in CD4 and CD8 T cells as well as cytokine production in primary PBMC cultures stimulated with CD3-antibodies. Like the s4-1BBL-Tri_{XVIII} containing supernatants and the purified 54-1BBL-Tri_{XVIII}, the therapeutic 4-1BB antibody MAb-2 also stimulated CD4 and CD8 T-cell proliferation and cytokine production. T-cell proliferation induced by s4-1BBL-Tri_{XVIII} supernatants administered at a dilution of 1:8 was comparable to MAb-2 administered at a concentration of 1 μg/ml. Both stimuli strongly enhanced the cytokine content of the culture supernatants. However, while MAb-2 was a potent inducer of GMCSF and IL-13, stimulation by s4-1BBL-Tri_{XVIII} was superior to MAb-2 in inducing IFN-γ production. Lastly, purified s4-1BBL-Tri_{XVIII} showed strong proliferation capacity in the CD4 and CD8 T cell subsets as well as in NK cells at administered concentrations of 10 μg/ml, 3 μg/ml and 1 μg/ml.

[0275] These data clearly demonstrate the potential of s4-1BBL-Tri_{XVIII} to activate and enhance proliferation in CD4 and CD8 T cells as well as NK cells.

### Example 9: s4-1BBLsh-Tri_{XVIII}

[0276] An expression plasm id encoding human 4-1BBL-Tri_{XVIII} was used to generate the PCR-product encoding soluble (s) 4-1BBLsh-Tri_{XVIII} protein, which contains a CD5 Leader sequence followed by a Strep-Tag and a HIS-Tag sequence, separated by a GGCGG linker, upstream of the extracellular part of 4-1 BBL (aa 90-242; Uniprot P41273). Between the Tag sequences and the 4-1BBL extracellular region lies the human collagen XVIII trimerization domain. In order to generate 4-1 BBLsh-Tri_{XVIII}, two PCR reactions were performed using s4-1BBL-Tri_{XVIII} as a template and with the following primers: First, forward CD5Leader-F_HindIII (SEQ ID NO:120); reverse 41BBLsh-TriXVIII-B (SEQ ID NO:121). Second, forward TriXVIII-41BBLsh-F (SEQ ID NO: 122); reverse 41BBLsh-B_NotI (SEQ ID NO: 123). The resulting two PCR products were then joined in a third PCR using the CD5Leader-F_HindIII (SEQ ID NO: 120) and the 41BBLsh-B_NotI (SEQ ID NO: 123) primer pair (sequences above). 4-1BBLsh-Tri_{XVIII} was cloned into the pCEP4 expression vector using HindIII and NotI restriction enzymes. The construct schemes to are shown in FIG. 14A.

[0277] To generate 54-1BBLsh-Tri_{XVIII} protein, HEK293T cells were transiently transfected via a standard calcium phosphate transfection and the cell culture supernatant was harvested after 48 to 72 hours. The soluble proteins were used within the supernatant without any purification steps.

[0278] In order to test 54-1BBLsh-Tri_{XVIII} functionally, binding assays and functional assays were performed using a Triple parameter reporter cell line (TPR) based on the human Jurkat JE6.1 T cell line (Jutz et al., 2016). The JE6.1 T cell line harbors fluorescent reporter constructs to concomitantly assess the activity of three transcription factors, which play major roles during T cell activation—NF-κB::eCFP; NFAT::eGFP and AP-1-mCherry. The TPR reporter cells were transduced to stably express human 4-1BB. Additionally, for functional assays, T cell stimulator cells (“TCS”) were used to activate the reporter cells. TCS are a murine thymoma cells line (BW5147) engineered to stably express a membrane bound anti-human CD3 single chain fragment (anti-CD3-scFv) that delivers signal one to T cell reporter cells (“TCS-Ctrl”) (Leitner et al., 2010). In addition, TCS transduced to express 4-1BBL (TCS-4-1BBL) were used to co-deliver signal one and a co-stimulatory signal to the 4-1BB-expressing reporter cells. The stimulatory effect of 4-1BB was then measured via flow cytometry through an enhanced expression of the NF-κB-reporter gene eCFP. The expression levels of 4-1BB on Jurkat reporter cells and the expression of 4-1BBL and anti-CD3 on TCS cells were confirmed using the following antibodies: 4-1BB-PE (4B4-1), 4-1BBL-PE (5F4) (both from Biolegend, San Diego, CA) and a DyLight-649-conjugated goat-anti-mouse IgG(H-FL) antibody (Jackson ImmunoResearch, West Grove, PA) for aCD3 single chain fragment detection (FIG. 14B).

[0279] For binding assays, 1×10⁵ 4-1 BB expressing cells in a volume of 10 μl were incubated with 50 μl of s4-1BBLsh-Tri_{XVIII}. Cells that express a control-scFv containing a Strep-Tag sequence and that do not express 4-1 BB were used as controls. After an incubation time of 30 min at 4° C., the samples were washed in FACS-Buffer (1×PBS, 0.5% FCS, 0.005% NaN₃) and stained with a biotinylated Strep-tag II mAb (GenScript, NJ) via adding 5 μl of a 1:150 dilution to each sample and incubate for 20 min on 4° C. Afterwards, samples were washed again and incubated for another 20 min on 4° C. upon adding 5 μl of a 1:200 dilution of Streptavid in-PE (BD Pharmingen, San Diego, CA) to each sample. Finally, samples were washed again and subsequently measured via flow cytometry, which was performed on a FACSCalibur flow cytometer (Becton Dickinson Immunocytometry System, San Jose, CA), using the CellQuest software. Data was analyzed with FlowJo (version 10.0.7, Tree Star, Ashland, OR) and Graphpad Prism (version 6, GraphPad Software, Inc., La Jolla, CA).

[0280] For functional testing of s4-1BBLsh-Tri_{XVIII}, 5×10⁴ 4-1BB-expressing and control T cell reporter cells were incubated with 2×10⁴ TCS-Ctrl or TCS-4-1BBL. s4-1BBLsh-Tri_{XVIII} was added to reporter cells stimulated with TCS-Ctrl at different concentrations. For a better comparison between the two trimerization domains, previously used s4-1BBL-Tri_{XVIII} was also administered to 4-1BB-expressing and control T cell reporter cells. Cells were incubated with s4-1BBLsh-Tri_{XVIII} and s4-1BBL-Tri_{XVIII} in 96-well flat bottom plates with an end volume of 100 μl. After a 24 hours incubation time NF-κB activation was measured through eCFP expression via flow cytometry. For analysis, TCS cells were excluded by using an APC-conjugated mouse CD45.2 antibody (#104, Biolegend, San Diego, CA) and gating on the APC-negative cell population. Flow cytometry was performed on a FACSFortessa flow cytometer (Becton Dickinson Immunocytometry System, San Jose, CA), using the FACSDiva software. Data was analyzed with FlowJo (version 10.0.7, Tree Star, Ashland, OR) and Graphpad Prism (version 6, GraphPad Software, Inc., La Jolla, CA).

[0281] Specific binding of s4-1BBLsh-Tri_{XVIII} to 4-1BB-expressing cells was confirmed with flow cytometry, whereas s4-1BBLsh-Tri_{XVIII} did not bind to control cells not expressing 4-1BB. The binding was dose-dependent and still detectable when using a 1:2084 dilution of the supernatant. The binding capacity previously of s4-1 BBLsh-Tri_{XVIII} and s4-1BBL-Tri_{XVIII} to 4-1BB-expressing cells was equally strong (FIGS. 14C and D).

[0282] Functional assays, using 54-1BBLsh-Tri_{XVIII} or 54-1BBL-Tri_{XVIII} supernatants on 4-1BB-expressing reporter cells in addition to TCS-Ctrl, revealed that s4-1BBLsh-Tri_{XVIII} has a strong capacity to functionally activate 4-1BB induced stimulation. Compared to supernatants containing 54-1BBL-Tri_{XVIII} the stimulatory capacity of 54-1BBLsh-Tri_{XVIII} was similar in higher concentrations and only slightly weaker in lower concentrations. (FIG. 14E).

### Example 10: Determination of a Minimal s4-1BBL-Tri_{XVIII} Construct

[0283] An expression plasmid encoding human 4-1BBLsh-Tri_{XVIII} was used to generate the PCR-product encoding the new different soluble (s) 4-1BBLsh-Tri_{XVIII} proteins, which all contain a CD5 Leader sequence followed by a Strep-Tag and a HIS-Tag sequence, separated by a GGCGG linker, upstream of the extracellular part of 4-1BBL (Uniprot P41273). Between the Tag sequences and the 4-1 BBL extracellular region lies the human collagen XVIII trimerization domain. In order to generate the new 4-1BBLsh-Tri_{XVIII} constructs the following PCR reactions were performed using 54-1BBLsh-Tri_{XVIII} as a template:

[0284] For 4-1BBLsh₉₀₋₂₄₁-Tri_{XVIII}: Forward Primer CD5Leader-F HindIII (SEQ ID NO: 126); reverse 41BBL(241)_NotI B (SEQ ID NO: 127). See the resulting construct of SEQ ID NO: 142.

[0285] For 4-1BBLsh₉₀₋₂₄₀-Tri_{XVIII}: First, forward CD5Leader-F HindIII (SEQ ID NO: 126); reverse 41BBLsh(90-240)_B_Not(SEQ ID NO: 128). See the resulting construct of SEQ ID NO: 143.

[0286] For 4-1BBLsh₉₀_239-Tri_{XVIII}: Forward CD5Leader-F HindIII (SEQ ID NO: 126; reverse 41BBLsh(90-239)_B_Not(SEQ ID NO: 129). See the resulting construct of SEQ ID NO: 144.

[0287] For 4-1BBLsh₉₀_238-Tri_{XVIII}: Forward CD5Leader-F HindIII (SEQ ID NO: 126; reverse 41BBLsh(90-238)_B_Not(SEQ ID NO: 130). See the resulting construct of SEQ ID NO: 145.

[0288] For 4-1BBLsh₉₀_237-Tri_{XVIII}: First, forward CD5Leader-F HindIII (SEQ ID NO: 126); reverse 41BBLsh(90-237)_B_Not(SEQ ID NO: 131). See the resulting construct of SEQ ID NO: 146.

[0289] For 4-1BBLsh₉₀_235-Tri_{XVIII}: First, forward CD5Leader-F HindIII (SEQ ID NO: 126); reverse 41BBL(235)_NotI B (SEQ ID NO: 132). See the resulting construct of SEQ ID NO: 147.

[0290] For 4-1BBLsh₉₁_242-Tri_{XVIII} two PCRs were performed: First, forward CD5Leader-F_HindIII (SEQ ID NO: 126); reverse 41BBLsh(91)-Tri_{XVIII}-B (SEQ ID NO: 133); Second, forward Tri_{XVIII}-41BBLsh(91)-F (SEQ ID NO: 134); reverse 41BBLsh-B NotI (SEQ ID NO: 135). The obtained two PCR products were then joined in a third PCR using the CD5Leader-F_HindIII and the 41BBLsh-B NotI primer pair. See the resulting construct of SEQ ID NO: 148.

[0291] The new 4-1BBLsh-Tri_{XVIII} inserts were cloned into the pCEP4 expression vector using HindIII and NotI restriction enzymes. The construct schemes are shown in FIG. 15A.

[0292] To generate the different 54-1BBLsh-Tri_{XVIII} proteins, HEK293T cells were transiently transfected via a standard calcium phosphate transfection and the cell culture supernatant was to harvested after 48 to 72 hours. The soluble proteins were used within the supernatant without any purification steps.

[0293] In order to test the new s4-1BBLsh-Tri_{XVIII} proteins, functional assays were performed. For that, a Jurkat monoreporter cell line based on the human Jurkat JE6.1 T cell line was used (Jutz et al., 2017). This cell line harbors a fluorescent reporter construct to assess the activity of the transcription factor NF-κB (NF-κB::eGFP), which plays a major roles during T cell activation. The reporter cells were transduced to stably express human 4-1BB. Additionally, for functional assays, T cell stimulator cells (short: TCS) were used to activate the reporter cells. TCS are a murine thymoma cells line (BW5147) engineered to stably express a membrane bound anti-human CD3 single chain fragment (anti-CD3-scFv) that delivers signal one to T cell reporter cells (short: TCS-Ctrl) (Leitner et al., 2010). In addition, TCS transduced to express 4-1BBL (TCS-4-1BBL), were used to co-deliver signal one and a co-stimulatory signal to the 4-1BB-expressing reporter cells. This stimulatory effect of 4-1 BB can then be easily measured via flow cytometry through an enhanced expression of the NF-κB-reporter gene eGFP. The expression levels of 4-1BB on Jurkat reporter cells and the expression of 4-1BBL and anti-CD3 on TCS cells were confirmed using the following antibodies: 4-1BB-PE (4B4-1), 4-1BBL-PE (5F4) (both from Biolegend, San Diego, CA) and a DyLight-649-conjugated goat-anti-mouse IgG(H-FL) antibody (Jackson ImmunoResearch, West Grove, PA) for aCD3 single chain fragment detection (FIG. 15B).

[0294] For functional testing of the different s4-1BBLsh-Tri_{XVIII} constructs, 5×10⁴ 4-1BB-expressing and control T cell reporter cells were incubated with 2×10⁴ TCS-Ctrl or TCS-4-1BBL. The s4-1BBLsh-Tri_{XVIII} proteins were added to the reporter cells that were stimulated with TCS-Ctrl in different concentrations. For a better comparison, previously used s4-1BBLsh-Tri_{XVIII} was also included in the experiment. For that, 96-well flat bottom plates were used with an end volume of 100 μl. After a 24 hours incubation time NF-κB activation was measured through eGFP expression via flow cytometry. For analysis, TCS cells were excluded by using an APC-conjugated mouse CD45.2 antibody (#104, Biolegend, San Diego, CA) and gating on the APC-negative cell population. Flow cytometry was performed on a FACSCalibur flow cytometer (Becton Dickinson Immunocytometry System, San Jose, CA), using the CellQuest software. Data was analyzed with FlowJo (version 10.0.7, Tree Star, Ashland, OR) and Graphpad Prism (version 6, GraphPad Software, Inc., La Jolla, CA).

[0295] Functional assays, using the different s4-1BBLsh-Tri_{XVIII} supernatants on 4-1BB-expressing reporter cells in addition to TCS-Ctrl, showed that a 4-1BBL protein containing amino acids 90-241 still is fully functional, whereas the ability to stimulate with the 90-240 construct is somewhat reduced. A 90-239 construct almost completely lost its stimulatory capacity. Truncating at the N-terminal end (91-242) still resulted in a functional protein and stimulation of the reporter cells (FIG. 15C).

### Example 11: Generation and Characterization of Multimerized Murine 4-1BBL (Ms4-1BBL-Tri_{XVIII})

[0296] An expression plasmid encoding murine 4-1BBL was used to generate a PCR-product encoding soluble (s) 4-1BBL protein, namely mouse s4-1BBL-Tri_{XVIII}, which contains a CD5 leader sequence followed by a Strep-Tag and a HIS-Tag sequence, separated by a GGCGG linker, upstream of the extracellular part of murine 4-1 BBL (aa 104-309; UniProt P20334). Like the human 54-1BBL-Tri_{XVIII} construct, the murine s4-1BBL-Tri_{XVIII} also harbors a trimerization domain between the Tag sequences and the 4-1 BBL extracellular region as well as a BamHI restriction site between the trimerization domain and the 4-1BBL extracellular region. In order to amplify DNA-sequences encoding ms4-1 BBL the following primers were used: forward, m41BBLex-F_BamH I (SEQ ID NO: 136; reverse, m4-1BBL-B-NotI (SEQ ID NO: 137). The murine s4-1BBL-Tri_{XVIII} is shown in SEQ ID NO: 140 (54-1BBL-Tri_{XVIII}). This PCR was performed using the already existing m4-1BBL encoding plasmid. The product was cloned into the pCEP4 expression vector that already contained the human s4-1BBL-Tri_{XVIII}. For that, the PCR product as well as the human 54-1BBL-TriXVIII_pCEP4 vector were digested using BamHI and NotI restriction enzymes to remove the human 4-1 BBL extracellular domain from the vector and replace it with the murine 4-1 BBL extracellular domain. The construct schemes are shown in FIG. 16A.

[0297] To generate ms4-1BBL-Tri_{XVIII}, HEK293T cells were transiently transfected via a standard calcium phosphate transfection and the cell culture supernatants were harvested after 48 to 72 hours. Culture supernatants containing ms4-1 BBL-Tri_{XVIII} were used at different dilutions.

[0298] Binding assays and functional assays were performed to test these supernatants. For that, a triple parameter reporter cell line (TPR) based on the human Jurkat JE6.1 T cell line was used (Jutz et al., 2016). This cell line harbours fluorescent reporter constructs to concomitantly to assess the activity of three transcription factors, which play major roles during T cell activation—NF-κB::eCFP; NFAT::eGFP and AP-1::mCherry. The TPR reporter cells were transduced to stably express murine 4-1BB. Additionally, for functional assays, T cell stimulator cells (short: TCS) were used to activate the reporter cells. TCS is a murine thymoma cells line (BW5147) engineered to stably express a membrane bound anti-human CD3 single chain fragment (anti-CD3-scFv) which engages the TCR/CD3 complex and delivers “signal one” to T cell reporter cells (Leitner et al., 2010). In addition, to TCS-Ctrl, which only delivers, signal 1, TCS transduced to express murine 4-1 BBL (TCS-m4-1BBL), were used to co-deliver signal one and a co-stimulatory signal to the m4-1BB-expressing reporter cells. This stimulatory effect of m4-1BB can then be easily measured via flow cytometry through an enhanced expression of the NF-κB-reporter gene eCFP which was mainly used as read-out for m4-1BB signaling. The expression levels of m4-1BB on Jurkat reporter cells and the expression of m4-1 BBL and anti-CD3 on TCS cells were confirmed using the following antibodies: m4-1BB-PE (17B-5) and m4-1BBL-PE (TKS-1) (both from Biolegend, San Diego, CA) (FIG. 16B).

[0299] For binding assays, 1×10⁵ m4-1BB expressing cells (JE6-1-TPR-m4-1BB) in a volume of 5 μl were incubated with 5 μl of ms4-1BBL-Tri_{XVIII} supernatants at the indicated dilutions (FIG. 9C). As controls, cells that do not express ms4-1BB were used. After an incubation time of 30 min at 4° C., the samples were washed in FACS-Buffer (1×PBS, 0.5% FCS, 0.005% NaN3) and stained with a biotinylated Strep-tag II mAb (GenScript, Piscataway, NJ) via adding 5 μl of a 1:150 dilution to each sample and incubated for 20 min on 4° C. Afterwards, samples were washed again and incubated for another 20 min on 4° C. upon adding 5 μl of a 1:200 dilution of Streptavidin-PE (BD Pharmingen, San Diego, CA) to each sample. At last, samples were washed again and subsequently measured via flow cytometry, which was performed on a FACSCalibur flow cytometer (Becton Dickinson Immunocytometry System, San Jose, CA), using the CellQuest software (FIG. 16C). Data was analyzed with FlowJo (version 10.0.7, Tree Star, Ashland, OR) and Graphpad Prism (version 6, GraphPad Software, Inc., La Jolla, CA).

[0300] For functional testing of murine s4-1 BBL-TriXVIII, 5×10⁴ m4-1BB-expressing and control T cell reporter cells were incubated with 2×10⁴ TCS-Ctrl or TCS-m4-1BBL, which served as positive control. Murine s4-1BBL-Tri_{XVIII} was added to the reporter cells that were stimulated with TCS-Ctrl in different concentrations (FIGS. 16D and 16E). For this, 96-well flat bottom plates were used with a final volume of 100 μl. After a 24 hours incubation time NF-κB activation was to measured through eCFP expression via flow cytometry. For analysis, TCS cells were excluded by using an APC-conjugated mouse CD45.2 antibody (#104, Biolegend, San Diego, CA) and gating on the APC-negative cell population. Flow cytometry was performed on a FACSFortessa flow cytometer (Becton Dickinson Immunocytometry System, San Jose, CA), using the FACSDiva software. Data was analyzed with FlowJo (version 10.0.7, Tree Star, Ashland, OR) and Graphpad Prism (version 6, GraphPad Software, Inc., La Jolla, CA).

[0301] By performing flow cytometry based binding studies, a specific binding of murine s4-1BBL-Tri_{XVIII} to m4-1BB-expressing cells could be confirmed. In addition, this soluble protein is not binding to cells not expressing m4-1BB. A dose-dependent binding signal was observed that was still detectable at a dilution of 1:15625 (FIG. 16C).

[0302] In a functional assay using m4-1BB expressing reporter cells in combination with TCS-Ctrl and soluble protein, a dose-dependent activation of m4-1BB was observed (FIGS. 16D and 16E). This strong capacity of the soluble proteins to activate NF-κB in the m4-1BB reporter cells was still detectable at a final dilution of 1:15625. Taken together these data indicate that like its human counterpart also murine s4-1BBL-TriXVIII functions as a potent agonist for m4-1BB. The potency of the murine s4-1BBL-TriXVIII to stimulate reporter cells expressing m4-1BB appears to be even higher, which could be due to a higher expression of m4-1BB on the reporter cells, a higher concentration of murine s4-1BBL-TriXVIII in the culture supernatants or a stronger interaction between murine s4-1BBL-TriXVIII and murine 4-1BB than between human 54-1BBL-TriXVIII and human 4-1BB.

### Example 12: Costimulatory Capacity of Supernatants Derived from Cells Infected with Measles Vectors Encoding Ms4-1BBL (CMV3-ATU_ms4-1BBL-TriXV)

[0303] Supernatants of measles virus-infected cells were sterile-filtered and provided by Themis Bioscience. Schemes of the constructs are shown in FIG. 16F.

[0304] For functional assays, 5×10⁴ mouse 4-1 BB-expressing and control T cell reporter cells were incubated with 2×10⁴ TCS-Ctrl and different dilutions of culture supernatants derived from cells infected with measles virus encoding soluble murine 4-1 BBL with a trimerization domain (ms4-1BBL-Tri_{XVIII}; MV-C). As a positive control m4-1 BB-expressing reporter cells were stimulated with TCS-4-1 BBL and MAb-2 as control, respectively (FIG. 16G). 96-well flat bottom plates were to used with an end volume of 100 μl and after a 24 hours incubation time NF-κB activation was measured through eCFP expression via flow cytometry. For analysis, TCS cells were excluded by using an APC-conjugated mouse CD45.2 antibody (#104, Biolegend, San Diego, CA) and gating on the APC-negative cell population. Flow cytometry was performed on a FACSFortessa flow cytometer (Becton Dickinson Immunocytometry System, San Jose, CA), using the FACSDiva software. Data was analyzed with FlowJo (version 10.0.7, Tree Star, Ashland, OR) and Graphpad Prism (version 6, GraphPad Software, Inc., La Jolla, CA).

[0305] By performing functional assays using murine 4-1BB expressing reporter cells in combination with TCS-Ctrl and soluble proteins, a dose-dependent activation of 4-1BB was observed for supernatants of measles virus vector MV-C(FIG. 16G). The supernatant of MV-C infected cells showed a very strong capacity to activate NF-κB in the m4-1BB reporter cells and basal level was still not reached with a dilution of 1/500. These data indicate that measles vectors can be engineered to deliver payloads that have the capacity to enhance T cell and NK cell responses via m4-1 BB co-stimulation.

### Example 13: Efficacy Study of MV-B Measles Virus Using CD34+ Humanized Mouse Model

[0306] The experiments were carried out with female NOD/Shi-scid/IL-2Rynull immunodeficient mouse strain. Mice were humanized using hematopoietic stem cells (CD34+) isolated from human cord blood following a proprietary humanization protocol (Transcure). Only mice with a humanization rate (hCD45/total CD45) above 25% were used in the study.

[0307] All procedures described in this study were reviewed and approved by the local ethic committee (CELEAG) and validated by the French Ministry of Research.

[0308] Mice were hosted in TCS BSL-2 facility by groups of 5 individuals. Each mouse was uniquely identified. Animals were housed in a ventilated cage (type II (16×19×35 cm, floor area=500 cm²)) under the following controlled conditions:
[0309] Room temperature (22±2° C.)
[0310] Hygrometry (55±10%)
[0311] Photoperiod (12:12-hour light-dark cycle 7 am:7 pm)
[0312] Water and food (Ref. 2018, Harlan France) available ad libitum

[0313] Mice were allowed to acclimate to the environment for 7 days prior to the beginning of the experiment. If required mice were anesthetized using isoflurane inhalation.

[0314] Tumor cells (HCT 116) were expanded in vitro following ATCC recommendation. Following a viability check, tumor cells in logarithmic growth phase were injected in the selected animals.

[0315] Mice were injected s.c. with tumor cells (HCT 116, number of cells TBD). Tumor engraftment was defined as Day 0.

[0316] Treatment started and Day 15 when the average tumor volume reached 50-100 mm³.

[0317] The mice were randomized based on tumor volume, CD34+ cell donors and humanization rate into the following groups of treatment:

| Groups | #of mice | Route | Compound(s) | Dose(s) | Timing |
|---|---|---|---|---|---|
| #1 | 5 | i.t. | Vehicle | 50 μl | Weekly |
| | | | (formulation | | (3 times |
| | | | buffer) control | | total) |
| #2 | 5 | i.t. | MV-control | 2 × 10⁶ | Weekly |
| | | | | TCID₅₀ in | (3 times |
| | | | | 50 μl | total) |
| #3 | 5 | i.t. | MV-B | 2 × 10⁶ | Weekly |
| | | | | TCID₅₀ in | (3 times |
| | | | | 50 μl | total) |

[0318] Oncolytic measles/vehicle control were given weekly for a total of 3 times starting on the first day of therapy (Day 15). MV-control is a measles virus (SEQ ID NO: 138) encoding a fusion gene.

[0319] The tumor volume was monitored 3 times per week using callipers. When large enough, the tumor volume was calculated using the formula: (Length×(Width)2/2). For each group of 5 animals, the average tumor volume was calculated and plotted over time.

[0320] The average tumor volume was 556 mm³ and 507 mm³ on Day 33 in the vehicle control and MV-control groups, respectively. In comparison, the MV-B group encoding s4-1BBL-Tri_{XVIII} showed an average tumor volume of only 274 mm³, which is about half the tumor volume of the other groups. A separation of the average tumor volume graphs for the groups becomes visible on Day 23 (8 days post initiation of treatment—see FIG. 17).

The application's sequence listing, which the Patent Office published only in electronic form, follows.

SEQUENCE LISTING (155 sequences)

SEQ ID NO: 1 - protein, 153 aa, Artificial Sequence
  Minimal sequence of TNF homology domain
GMFAQLVAQNVLLIDGPLSWYSDPGLAGVSLTGGLSYKEDTKELVVAKAGVYYVFFQLELRRVVAGEGSGSVSLALHLQPLRSAAGAAALALTVDLPPASSEARNSAFGFQGRLLHLSAGQRLGVHLHTEARARHAWQLTQGATVLGLFRVTP

SEQ ID NO: 2 - protein, 254 aa, Homo sapiens
MEYASDASLDPEAPWPPAPRARACRVLPWALVAGLLLLLLLAAACAVFLACPWAVSGARASPGSAASPRLREGPELSPDDPAGLLDLRQGMFAQLVAQNVLLIDGPLSWYSDPGLAGVSLTGGLSYKEDTKELVVAKAGVYYVFFQLELRRVVAGEGSGSVSLALHLQPLRSAAGAAALALTVDLPPASSEARNSAFGFQGRLLHLSAGQRLGVHLHTEARARHAWQLTQGATVLGLFRVTPEIPAGLPSPRSE

SEQ ID NO: 3 - protein, 203 aa, Artificial Sequence
  soluble 4-1BBL ectodomain construct
PWAVSGARASPGSAASPRLREGPELSPDDPAGLLDLRQGMFAQLVAQNVLLIDGPLSWYSDPGLAGVSLTGGLSYKEDTKELVVAKAGVYYVFFQLELRRVVAGEGSGSVSLALHLQPLRSAAGAAALALTVDLPPASSEARNSAFGFQGRLLHLSAGQRLGVHLHTEARARHAWQLTQGATVLGLFRVTPEIPAGLPSPRSE

SEQ ID NO: 4 - protein, 170 aa, Artificial Sequence
  soluble 4-1BBL ectodomain construct
LDLRQGMFAQLVAQNVLLIDGPLSWYSDPGLAGVSLTGGLSYKEDTKELVVAKAGVYYVFFQLELRRVVAGEGSGSVSLALHLQPLRSAAGAAALALTVDLPPASSEARNSAFGFQGRLLHLSAGQRLGVHLHTEARARHAWQLTQGATVLGLFRVTPEIPAGLPSPRSE

SEQ ID NO: 5 - protein, 191 aa, Artificial Sequence
  soluble 4-1BBL ectodomain construct
PWAVSGARASPGSAASPRLREGPELSPDDPAGLLDLRQGMFAQLVAQNVLLIDGPLSWYSDPGLAGVSLTGGLSYKEDTKELVVAKAGVYYVFFQLELRRVVAGEGSGSVSLALHLQPLRSAAGAAALALTVDLPPASSEARNSAFGFQGRLLHLSAGQRLGVHLHTEARARHAWQLTQGATVLGLFRVTP

SEQ ID NO: 6 - protein, 158 aa, Artificial Sequence
  soluble 4-1BBL ectodomain construct
LDLRQGMFAQLVAQNVLLIDGPLSWYSDPGLAGVSLTGGLSYKEDTKELVVAKAGVYYVFFQLELRRVVAGEGSGSVSLALHLQPLRSAAGAAALALTVDLPPASSEARNSAFGFQGRLLHLSAGQRLGVHLHTEARARHAWQLTQGATVLGLFRVTP

SEQ ID NO: 7 - protein, 58 aa, Artificial Sequence
  Trimerization domain XVIII
GVRLWATRQAMLGQVHEVPEGWLIFVAEQEELYVRVQNGFRKVQLEARTPLPRGTDNE

SEQ ID NO: 8 - protein, 59 aa, Artificial Sequence
  Trimerization domain XV
GSRNLVTAFSNMDDMLQKAHLVIEGTFIYLRDSTEFFIRVRDGWKKLQLGELIPIPADS

SEQ ID NO: 9 - protein, 5 aa, Artificial Sequence
  Linker
GGSGG

SEQ ID NO: 10 - protein, 23 aa, Artificial Sequence
  Linker
GGSGGSGAGGSGGSSGSDGASGS

SEQ ID NO: 11 - protein, 15 aa, Artificial Sequence
  Linker
GGGGSGGGGSGGGGS

SEQ ID NO: 12 - protein, 8 aa, Artificial Sequence
  Linker
GSGSGSGS

SEQ ID NO: 13 - protein, 18 aa, Artificial Sequence
  Linker
KESGSVSSEQLAQFRSLD

SEQ ID NO: 14 - protein, 14 aa, Artificial Sequence
  Linker
EGKSSGSGSESKST

SEQ ID NO: 15 - protein, 25 aa, Artificial Sequence
  Linker
GGSGGGSSGAGGSGGSSGSDGASGS

SEQ ID NO: 16 - protein, 25 aa, Artificial Sequence
  Linker
GGSGGTRSGAGGSGGSSGSDGASGS

SEQ ID NO: 17 - protein, 24 aa, Artificial Sequence
  CD5 Leader Sequence
MPMGSLQPLATLYLLGMLVASCLG

SEQ ID NO: 18 - protein, 11 aa, Artificial Sequence
  Strep-Tag
GSNWSHPQFEK

SEQ ID NO: 19 - protein, 6 aa, Artificial Sequence
  Hexa-HIS Tag
HHHHHH

SEQ ID NO: 20 - DNA, 20304 bp, Artificial Sequence
  Vector with soluble s4-1BBL ectodomain construct
accaaacaaagttgggtaaggatagttcaatcaatgatcatcttctagtgcacttaggattcaagatcctattatcagggacaagagcaggattagggatatctcgaggcgcgtgccaccatgcccatggggtctctgcaaccgctggccaccttgtacctgctggggatgctggtcgcttcctgcctcggattggacctgcggcagggcatgtttgcgcagctggtggcccaaaatgttctgctgatcgatgggcccctgagctggtacagtgacccaggcctggcaggcgtgtccctgacggggggcctgagctacaaagaggacacgaaggagctggtggtggccaaggctggagtctactatgtcttctttcaactagagctgcggcgcgtggtggccggcgagggctcaggctccgtttcacttgcgctgcacctgcagccactgcgctctgctgctggggccgccgccctggctttgaccgtggacctgccacccgcctcctccgaggctcggaactcggccttcggtttccagggccgcttgctgcacctgagtgccggccagcgcctgggcgtccatcttcacactgaggccagggcacgccatgcctggcagcttacccagggcgccacagtcttgggactcttccgggtgacccccgaaatcccagccggactcccttcaccgaggtcggaataaacgcgccatccatcattgttataaaaaacttaggattcaagatcctattatcagggacaagagcaggattagggatatccgagatggccacacttttaaggagcttagcattgttcaaaagaaacaaggacaaaccacccattacatcaggatccggtggagccatcagaggaatcaaacacattattatagtaccaatccctggagattcctcaattaccactcgatccagacttctggaccggttggtgaggttaattggaaacccggatgtgagcgggcccaaactaacaggggcactaataggtatattatccttatttgtggagtctccaggtcaattgattcagaggatcaccgatgaccctgacgttagcataaggctgttagaggttgtccagagtgaccagtcacaatctggccttaccttcgcatcaagaggtaccaacatggaggatgaggcggaccaatacttttcacatgatgatccaattagtagtgatcaatccaggttcggatggttcgggaacaaggaaatctcagatattgaagtgcaagaccctgagggattcaacatgattctgggtaccatcctagcccaaatttgggtcttgctcgcaaaggcggttacggccccagacacggcagctgattcggagctaagaaggtggataaagtacacccaacaaagaagggtagttggtgaatttagattggagagaaaatggttggatgtggtgaggaacaggattgccgaggacctctccttacgccgattcatggtcgctctaatcctggatatcaagagaacacccggaaacaaacccaggattgctgaaatgatatgtgacattgatacatatatcgtagaggcaggattagccagttttatcctgactattaagtttgggatagaaactatgtatcctgctcttggactgcatgaatttgctggtgagttatccacacttgagtccttgatgaacctttaccagcaaatgggggaaactgcaccctacatggtaatcctggagaactcaattcagaacaagttcagtgcaggatcataccctctgctctggagctatgccatgggagtaggagtggaacttgaaaactccatgggaggtttgaactttggccgatcttactttgatccagcatattttagattagggcaagagatggtaaggaggtcagctggaaaggtcagttccacattggcatctgaactcggtatcactgccgaggatgcaaggcttgtttcagagattgcaatgcatactactgaggacaagatcagtagagcggttggacccagacaagcccaagtatcatttctacacggtgatcaaagtgagaatgagctaccgagattggggggcaaggaagataggagggtcaaacagagtcgaggagaagccagggagagctacagagaaaccgggcccagcagagcaagtgatgcgagagctgcccatcttccaaccggcacacccctagacattgacactgcaacggagtccagccaagatccgcaggacagtcgaaggtcagctgacgccctgcttaggctgcaagccatggcaggaatctcggaagaacaaggctcagacacggacacccctatagtgtacaatgacagaaatcttctagactaggtgcgagaggccgagggccagaacaacatccgcctaccatccatcattgttataaaaaacttaggaaccaggtccacacagccgccagcccatcaaccatccactcccacgattggagccaatggcagaagagcaggcacgccatgtcaaaaacggactggaatgcatccgggctctcaaggccgagcccatcggctcactggccatcgaggaagctatggcagcatggtcagaaatatcagacaacccaggacaggagcgagccacctgcagggaagagaaggcaggcagttcgggtctcagcaaaccatgcctctcagcaattggatcaactgaaggcggtgcacctcgcatccgcggtcagggacctggagagagcgatgacgacgctgaaactttgggaatccccccaagaaatctccaggcatcaagcactgggttacagtgttattacgtttatgatcacagcggtgaagcggttaagggaatccaagatgctgactctatcatggttcaatcaggccttgatggtgatagcaccctctcaggaggagacaatgaatctgaaaacagcgatgtggatattggcgaacctgataccgagggatatgctatcactgaccggggatctgctcccatctctatggggttcagggcttctgatgttgaaactgcagaaggaggggagatccacgagctcctgagactccaatccagaggcaacaactttccgaagcttgggaaaactctcaatgttcctccgcccccggaccccggtagggccagcacttccgggacacccattaaaaagggcacagacgcgagattagcctcatttggaacggagatcgcgtctttattgacaggtggtgcaacccaatgtgctcgaaagtcaccctcggaaccatcagggccaggtgcacctgcggggaatgtccccgagtgtgtgagcaatgccgcactgatacaggagtggacacccgaatctggtaccacaatctccccgagatcccagaataatgaagaagggggagactattatgatgatgagctgttctctgatgtccaagatattaaaacagccttggccaaaatacacgaggataatcagaagataatctccaagctagaatcactgctgttattgaagggagaagttgagtcaattaagaagcagatcaacaggcaaaatatcagcatatccaccctggaaggacacctctcaagcatcatgatcgccattcctggacttgggaaggatcccaacgaccccactgcagatgtcgaaatcaatcccgacttgaaacccatcataggcagagattcaggccgagcactggccgaagttctcaagaaacccgttgccagccgacaactccaaggaatgacaaatggacggaccagttccagaggacagctgctgaaggaatttcagctaaagccgatcgggaaaaagatgagctcagccgtcgggtttgttcctgacaccggccctgcatcacgcagtgtaatccgctccattataaaatccagccggctagaggaggatcggaagcgttacctgatgactctccttgatgatatcaaaggagccaatgatcttgccaagttccaccagatgctgatgaagataataatgaagtagctacagctcaacttacctgccaaccccatgccagtcgacccaactagtacaacctaaatccattataaaaaacttaggagcaaagtgattgcctcccaaggtccacaatgacagagacctacgacttcgacaagtcggcatgggacatcaaagggtcgatcgctccgatacaacccaccacctacagtgatggcaggctggtgccccaggtcagagtcatagatcctggtctaggcgacaggaaggatgaatgctttatgtacatgtttctgctgggggttgttgaggacagcgattccctagggcctccaatcgggcgagcatttgggttcctgcccttaggtgttggcagatccacagcaaagcccgaaaaactcctcaaagaggccactgagcttgacatagttgttagacgtacagcagggctcaatgaaaaactggtgttctacaacaacaccccactaactctcctcacaccttggagaaaggtcctaacaacagggagtgtcttcaacgcaaaccaagtgtgcaatgcggttaatctgataccgctcgataccccgcagaggttccgtgttgtttatatgagcatcacccgtctttcggataacgggtattacaccgttcctagaagaatgctggaattcagatcggtcaatgcagtggccttcaacctgctggtgacccttaggattgacaaggcgataggccctgggaagatcatcgacaatacagagcaacttcctgaggcaacatttatggtccacatcgggaacttcaggagaaagaagagtgaagtctactctgccgattattgcaaaatgaaaatcgaaaagatgggcctggtttttgcacttggtgggatagggggcaccagtcttcacattagaagcacaggcaaaatgagcaagactctccatgcacaactcgggttcaagaagaccttatgttacccgctgatggatatcaatgaagaccttaatcgattactctggaggagcagatgcaagatagtaagaatccaggcagttttgcagccatcagttcctcaagaattccgcatttacgacgacgtgatcataaatgatgaccaaggactattcaaagttctgtagaccgtagtgcccagcaatgcccgaaaacgacccccctcacaatgacagccagaaggcccggacaaaaaagccccctccgaaagactccacggaccaagcgagaggccagccagcagccgacggcaagcgcgaacaccaggcggccccagcacagaacagccctgacacaaggccaccaccagccaccccaatctgcatcctcctcgtgggacccccgaggaccaacccccaaggctgcccccgatccaaaccaccaaccgcatccccaccacccccgggaaagaaacccccagcaattggaaggcccctccccctcttcctcaacacaagaactccacaaccgaaccgcacaagcgaccgaggtgacccaaccgcaggcatccgactccctagacagatcctctctccccggcaaactaaacaaaacttagggccaaggaacatacacacccaacagaacccagaccccggcccacggcgccgcgcccccaacccccgacaaccagagggagcccccaaccaatcccgccggctcccccggtgcccacaggcagggacaccaacccccgaacagacccagcacccaaccatcgacaatccaagacgggggggcccccccaaaaaaaggcccccaggggccgacagccagcaccgcgaggaagcccacccaccccacacacgaccacggcaaccaaaccagaacccagaccaccctgggccaccagctcccagactcggccatcaccccgcagaaaggaaaggccacaacccgcgcaccccagccccgatccggcggggagccacccaacccgaaccagcacccaagagcgatccccgaaggacccccgaaccgcaaaggacatcagtatcccacagcctctccaagtcccccggtctcctcctcttctcgaagggaccaaaagatcaatccaccacacccgacgacactcaactccccacccctaaaggagacaccgggaatcccagaatcaagactcatccaatgtccatcatgggtctcaaggtgaacgtctctgccatattcatggcagtactgttaactctccaaacacccaccggtcaaatccattggggcaatctctctaagataggggtggtaggaataggaagtgcaagctacaaagttatgactcgttccagccatcaatcattagtcataaaattaatgcccaatataactctcctcaataactgcacgagggtagagattgcagaatacaggagactactgagaacagttttggaaccaattagagatgcacttaatgcaatgacccagaatataagaccggttcagagtgtagcttcaagtaggagacacaagagatttgcgggagtagtcctggcaggtgcggccctaggcgttgccacagctgctcagataacagccggcattgcacttcaccagtccatgctgaactctcaagccatcgacaatctgagagcgagcctggaaactactaatcaggcaattgagacaatcagacaagcagggcaggagatgatattggctgttcagggtgtccaagactacatcaataatgagctgataccgtctatgaaccaactatcttgtgatttaatcggccagaagctcgggctcaaattgctcagatactatacagaaatcctgtcattatttggccccagtttacgggaccccatatctgcggagatatctatccaggctttgagctatgcgcttggaggagacatcaataaggtgttagaaaagctcggatacagtggaggtgatttactgggcatcttagagagcggaggcatcaaggcccggataactcacgtcgacacagagtcctacttcattgtcctcagtatagcctatccgacgctgtccgagattaagggggtgattgtccaccggctagagggggtctcgtacaacataggctctcaagagtggtataccactgtgcccaagtatgttgcaacccaagggtaccttatctcgaattttgatgagtcatcgtgtactttcatgccagaggggactgtgtgcagccaaaatgccttgtacccgatgagtcctctgctccaagaatgcctccgggggtacaccaagtcctgtgctcgtacactcgtatccgggtcttttgggaaccggttcattttatcacaagggaacctaatagccaattgtgcatcaatcctttgcaagtgttacacaacaggaacgatcattaatcaagaccctgacaagatcctaacatacattgctgccgatcactgcccggtagtcgaggtgaacggcgtgaccatccaagtcgggagcaggaggtatccagacgctgtgtacttgcacagaattgacctcggtcctcccatatcattggagaggttggacgtagggacaaatctggggaatgcaattgctaagttggaggatgccaaggaattgttggagtcatcggaccagatattgaggagtatgaaaggtttatcgagcactagcatagtctacatcctgattgcagtgtgtcttggagggttgatagggatccccgctttaatatgttgctgcagggggcgttgtaacaaaaagggagaacaagttggtatgtcaagaccaggcctaaagcctgatcttacgggaacatcaaaatcctatgtaaggtcgctctgatcctctacaactcttgaaacacaaatgtcccacaagtctcctcttcgtcatcaagcaaccaccgcacccagcatcaagcccacctgaaattatctccggcttccctctggccgaacaatatcggtagttaatcaaaacttagggtgcaagatcatccacaatgtcaccacaacgagaccggataaatgccttctacaaagataacccccatcccaagggaagtaggatagtcattaacagagaacatcttatgattgatagaccttatgttttgctggctgttctgtttgtcatgtttctgagcttgatcgggttgctagccattgcaggcattagacttcatcgggcagccatctacaccgcagagatccataaaagcctcagcaccaatctagatgtaactaactcaatcgagcatcaggtcaaggacgtgctgacaccactcttcaaaatcatcggtgatgaagtgggcctgaggacacctcagagattcactgacctagtgaaattaatctctgacaagatcaagttccttaatccggatagggagtacgacttcagagatctcacttggtgtatcaacccgccagagagaatcaaattggattatgatcaatactgtgcagatgtggctgctgaagagctcatgaatgcattggtgaactcaactctactggagaccagaacaaccaatcagttcctagctgtctcaaagggaaactgctcagggcccactacaatcagaggtcaattctcaaacatgtcgctgtccctgttagacttgtatttaggtcgaggttacaatgtgtcatctatagtcactatgacatcccagggaatgtatgggggaacttacctagtggaaaagcctaatctgagcagcaaaaggtcagagttgtcacaactgagcatgtaccgagtgtttgaagtaggtgttatcagaaatccgggtttgggggctccggtgttccatatgacaaactatcttgagcaaccagtcagtaatgatctcagcaactgtatggtggctttgggggagctcaaactcgcagccctttgtcacggggaagattctatcacaattccctatcagggatcagggaaaggtgtcagcttccagctcgtcaagctaggtgtctggaaatccccaaccgacatgcaatcctgggtccccttatcaacggatgatccagtgatagacaggctttacctctcatctcacagaggtgttatcgctgacaatcaagcaaaatgggctgtcccgacaacacgaacagatgacaagttgcgaatggagacatgcttccaacaggcgtgtaagggtaaaatccaagcactctgcgagaatcccgagtgggcaccattgaaggataacaggattccttcatacggggtcttgtctgttgatctgagtctgacagttgagcttaaaatcaaaattgcttcgggattcgggccattgatcacacacggttcagggatggacctatacaaatccaaccacaacaatgtgtattggctgactatcccgccaatgaagaacctagccttaggtgtaatcaacacattggagtggataccgagattcaaggttagtccctacctcttcactgtcccaattaaggaagcaggcgaagactgccatgccccaacatacctacctgcggaggtggatggtgatgtcaaactcagttccaatctggtgattctacctggtcaagatctccaatatgttttggcaacctacgatacttccagggttgaacatgctgtggtttattacgtttacagcccaagccgctcattttcttacttttatccttttaggttgcctataaagggggtccccatcgaattacaagtggaatgcttcacatgggaccaaaaactctggtgccgtcacttctgtgtgcttgcggactcagaatctggtggacatatcactcactctgggatggtgggcatgggagtcagctgcacagtcacccgggaagatggaaccaatcgcagatagggctgctagtgaaccaatcacatgatgtcacccagacatcaggcatacccactagtgtgaaatagacatcagaattaagaaaaacgtagggtccaagtggttccccgttatggactcgctatctgtcaaccagatcttataccctgaagttcacctagatagcccgatagttaccaataagatagtagccatcctggagtatgctcgagtccctcacgcttacagcctggaggaccctacactgtgtcagaacatcaagcaccgcctaaaaaacggattttccaaccaaatgattataaacaatgtggaagttgggaatgtcatcaagtccaagcttaggagttatccggcccactctcatattccatatccaaattgtaatcaggatttatttaacatagaagacaaagagtcaacgaggaagatccgtgaactcctcaaaaaggggaattcgctgtactccaaagtcagtgataaggttttccaatgcttaagggacactaactcacggcttggcctaggctccgaattgagggaggacatcaaggagaaagttattaacttgggagtttacatgcacagctcccagtggtttgagccctttctgttttggtttacagtcaagactgagatgaggtcagtgattaaatcacaaacccatacttgccataggaggagacacacacctgtattcttcactggtagttcagttgagttgctaatctctcgtgaccttgttgctataatcagtaaagagtctcaacatgtatattacctgacatttgaactggttttgatgtattgtgatgtcatagaggggaggttaatgacagagaccgctatgactattgatgctaggtatacagagcttctaggaagagtcagatacatgtggaaactgatagatggtttcttccctgcactcgggaatccaacttatcaaattgtagccatgctggagcctctttcacttgcttacctgcagctgagggatataacagtagaactcagaggtgctttccttaaccactgctttactgaaatacatgatgttcttgaccaaaacgggttttctgatgaaggtacttatcatgagttaactgaagctctagattacattttcataactgatgacatacatctgacaggggagattttctcatttttcagaagtttcggccaccccagacttgaagcagtaacggctgctgaaaatgttaggaaatacatgaatcagcctaaagtcattgtgtatgagactctgatgaaaggtcatgccatattttgtggaatcataatcaacggctatcgtgacaggcacggaggcagttggccaccgctgaccctccccctgcatgctgcagacacaatccggaatgctcaagcttcaggtgaagggttaacacatgagcagtgcgttgataactggaaatcttttgctggagtgaaatttggctgctttatgcctcttagcctggatagtgatctgacaatgtacctaaaggacaaggcacttgctgctctccaaagggaatgggattcagtttacccgaaagagttcctgcgttacgaccctcccaagggaaccgggtcacggaggcttgtagatgttttccttaatgattcgagctttgacccatatgatgtgataatgtatgttgtaagtggagcttacctccatgaccctgagttcaacctgtcttacagcctgaaagaaaaggagatcaaggaaacaggtagactttttgctaaaatgacttacaaaatgagggcatgccaagtgattgctgaaaatctaatctcaaacgggattggcaaatattttaaggacaatgggatggccaaggatgagcacgatttgactaaggcactccacactctagctgtctcaggagtccccaaagatctcaaagaaagtcacaggggggggccagtcttaaaaacctactcccgaagcccagtccacacaagtaccaggaacgtgagagcagcaaaagggtttatagggttccctcaagtaattcggcaggaccaagacactgatcatccggagaatatggaagcttacgagacagtcagtgcatttatcacgactgatctcaagaagtactgccttaattggagatatgagaccatcagcttgtttgcacagaggctaaatgagatttacggattgccctcatttttccagtggctgcataagaggcttgagacctctgtcctgtatgtaagtgaccctcattgcccccccgaccttgacgcccatatcccgttatataaagtccccaatgatcaaatcttcattaagtaccctatgggaggtatagaagggtattgtcagaagctgtggaccatcagcaccattccctatctatacctggctgcttatgagagcggagtaaggattgcttcgttagtgcaaggggacaatcagaccatagccgtaacaaaaagggtacccagcacatggccctacaaccttaagaaacgggaagctgctagagtaactagagattactttgtaattcttaggcaaaggctacatgatattggccatcacctcaaggcaaatgagacaattgtttcatcacatttttttgtctattcaaaaggaatatattatgatgggctacttgtgtcccaatcactcaagagcatcgcaagatgtgtattctggtcagagactatagttgatgaaacaagggcagcatgcagtaatattgctacaacaatggctaaaagcatcgagagaggttatgaccgttaccttgcatattccctgaacgtcctaaaagtgatacagcaaattctgatctctcttggcttcacaatcaattcaaccatgacccgggatgtagtcatacccctcctcacaaacaacgacctcttaataaggatggcactgttgcccgctcctattggggggatgaattatctgaatatgagcaggctgtttgtcagaaacatcggtgatccagtaacatcatcaattgctgatctcaagagaatgattctcgcctcactaatgcctgaagagaccctccatcaagtaatgacacaacaaccgggggactcttcattcctagactgggctagcgacccttactcagcaaatcttgtatgtgtccagagcatcactagactcctcaagaacataactgcaaggtttgtcctgatccatagtccaaacccaatgttaaaaggattattccatgatgacagtaaagaagaggacgagggactggcggcattcctcatggacaggcatattatagtacctagggcagctcatgaaatcctggatcatagtgtcacaggggcaagagagtctattgcaggcatgctggataccacaaaaggcttgattcgagccagcatgaggaagggggggttaacctctcgagtgataaccagattgtccaattatgactatgaacaattcagagcagggatggtgctattgacaggaagaaagagaaatgtcctcattgacaaagagtcatgttcagtgcagctggcgagagctctaagaagccatatgtgggcgaggctagctcgaggacggcctatttacggccttgaggtccctgatgtactagaatctatgcgaggccaccttattcggcgtcatgagacatgtgtcatctgcgagtgtggatcagtcaactacggatggttttttgtcccctcgggttgccaactggatgatattgacaaggaaacatcatccttgagagtcccatatattggttctaccactgatgagagaacagacatgaagcttgccttcgtaagagccccaagtcgatccttgcgatctgctgttagaatagcaacagtgtactcatgggcttacggtgatgatgatagctcttggaacgaagcctggttgttggctaggcaaagggccaatgtgagcctggaggagctaagggtgatcactcccatctcaacttcgactaatttagcgcataggttgagggatcgtagcactcaagtgaaatactcaggtacatcccttgtccgagtggcgaggtataccacaatctccaacgacaatctctcatttgtcatatcagataagaaggttgatactaactttatataccaacaaggaatgcttctagggttgggtgttttagaaacattgtttcgactcgagaaagataccggatcatctaacacggtattacatcttcacgtcgaaacagattgttgcgtgatcccgatgatagatcatcccaggatacccagctcccgcaagctagagctgagggcagagctatgtaccaacccattgatatatgataatgcacctttaattgacagagatgcaacaaggctatacacccagagccataggaggcaccttgtggaatttgttacatggtccacaccccaactatatcacattttagctaagtccacagcactatctatgattgacctggtaacaaaatttgagaaggaccatatgaatgaaatttcagctctcataggggatgacgatatcaatagtttcataactgagtttctgctcatagagccaagattattcactatctacttgggccagtgtgcggccatcaattgggcatttgatgtacattatcatagaccatcagggaaatatcagatgggtgagctgttgtcatcgttcctttctagaatgagcaaaggagtgtttaaggtgcttgtcaatgctctaagccacccaaagatctacaagaaattctggcattgtggtattatagagcctatccatggtccttcacttgatgctcaaaacttgcacacaactgtgtgcaacatggtttacacatgctatatgacctacctcgacctgttgttgaatgaagagttagaagagttcacatttctcttgtgtgaaagcgacgaggatgtagtaccggacagattcgacaacatccaggcaaaacacttatgtgttctggcagatttgtactgtcaaccagggacctgcccaccaattcgaggtctaagaccggtagagaaatgtgcagttctaaccgaccatatcaaggcagaggctatgttatctccagcaggatcttcgtggaacataaatccaattattgtagaccattactcatgctctctgacttatctccggcgaggatcgatcaaacagataagattgagagttgatccaggattcattttcgacgccctcgctgaggtaaatgtcagtcagccaaagatcggcagcaacaacatctcaaatatgagcatcaaggctttcagacccccacacgatgatgttgcaaaattgctcaaagatatcaacacaagcaagcacaatcttcccatttcagggggcaatctcgccaattatgaaatccatgctttccgcagaatcgggttgaactcatctgcttgctacaaagctgttgagatatcaacattaattaggagatgccttgagccaggggaggacggcttgttcttgggtgagggatcgggttctatgttgatcacttataaagagatacttaaactaaacaagtgcttctataatagtggggtttccgccaattctagatctggtcaaagggaattagcaccctatccctccgaagttggccttgtcgaacacagaatgggagtaggtaatattgtcaaagtgctctttaacgggaggcccgaagtcacgtgggtaggcagtgtagattgcttcaatttcatagttagtaatatccctacctctagtgtggggtttatccattcagatatagagaccttgcctgacaaagatactatagagaagctagaggaattggcagccatcttatcgatggctctgctcctgggcaaaataggatcaatactggtgattaagcttatgcctttcagcggggattttgttcagggatttataagttatgtagggtctcattatagagaagtgaaccttgtataccctagatacagcaacttcatctctactgaatcttatttggttatgacagatctcaaggctaaccggctaatgaatcctgaaaagattaagcagcagataattgaatcatctgtgaggacttcacctggacttataggtcacatcctatccattaagcaactaagctgcatacaagcaattgtgggagacgcagttagtagaggtgatatcaatcctactctgaaaaaacttacacctatagagcaggtgctgatcaattgcgggttggcaattaacggacctaagctgtgcaaagaattgatccaccatgatgttgcctcagggcaagatggattgcttaattctatactcatcctctacagggagttggcaagattcaaagacaaccaaagaagtcaacaagggatgttccacgcttaccccgtattggtaagtagcaggcaacgagaacttatatctaggatcacccgcaaattctgggggcacattcttctttactccgggaacaaaaagttgataaataagtttatccagaatctcaagtccggctatctgatactagacttacaccagaatatcttcgttaagaatctatccaagtcagagaaacagattattatgacggggggtttgaaacgtgagtgggtttttaaggtaacagtcaaggagaccaaagaatggtataagttagtcggatacagtgccctgattaaggactaattggttgaactccggaaccctaatcctgccctaggtggttaggcattatttgcaatatattaaagaaaactttgaaaatacgaagtttctattcccagctttgtctggtggccggcatggtcccagcctcctcgctggcgccggctgggcaacattccgaggggaccgtcccctcggtaatggcgaatgggacgcggccggtcgatcgacgatccggctgctaacaaagcccgaaaggaagctgagttggctgctgccaccgctgagcaataactagcataaccccttggggcctctaaacgggtcttgaggggttttttgctgaaaggaggaactatatccggatcgagatcaattctgtgagcgtatggcaaacgaaggaaaaatagttatagtagccgcactcgatgggacatttcaacgtaaaccgtttaataatattttgaatcttattccattatctgaaatggtggtaaaactaactgctgtgtgtatgaaatgctttaaggaggcttccttttctaaacgattgggtgaggaaaccgagatagaaataataggaggtaatgatatgtatcaatcggtgtgtagaaagtgttacatcgactcataatattatattttttatctaaaaaactaaaaataaacattgattaaattttaatataatacttaaaaatggatgttgtgtcgttagataaaccgtttatgtattttgaggaaattgataatgagttagattacgaaccagaaagtgcaaatgaggtcgcaaaaaaactgccgtatcaaggacagttaaaactattactaggagaattattttttcttagtaagttacagcgacacggtatattagatggtgccaccgtagtgtatataggatctgctcccggtacacatatacgttatttgagagatcatttctataatttaggagtgatcccgaaaggaagctgagttggctgctgccaccgctgagcaataactagcataaccccttggggcctctaaacgggtcttgaggggttttttgctgaaaggaggaacgcgcctgatgcggtattttctccttacgcatctgtgcggtatttcacaccgcatatatggtgcactctcagtacaatctgctctgatgccgcatagttaagccagccccgacacccgccaacacccgctgacgcgccctgacgggcttgtctgctcccggcatccgcttacagacaagctgtgaccgtctccgggagctgcatgtgtcagaggttttcaccgtcatcaccgaaacgcgcgagacgaaagggcctcgtgatacgcctatttttataggttaatgtcatgataataatggtttcttagacgtcaggtggcacttttcggggaaatgtgcgcggaacccctatttgtttatttttctaaatacattcaaatatgtatccgctcatgagacaataaccctgataaatgcttcaataatattgaaaaaggaagagtatgagtattcaacatttccgtgtcgcccttattcccttttttgcggcattttgccttcctgtttttgctcacccagaaacgctggtgaaagtaaaagatgctgaagatcagttgggtgcacgagtgggttacatcgaactggatctcaacagcggtaagatccttgagagttttcgccccgaagaacgttttccaatgatgagcacttttaaagttctgctatgtggcgcggtattatcccgtattgacgccgggcaagagcaactcggtcgccgcatacactattctcagaatgacttggttgagtactcaccagtcacagaaaagcatcttacggatggcatgacagtaagagaattatgcagtgctgccataaccatgagtgataacactgcggccaacttacttctgacaacgatcggaggaccgaaggagctaaccgcttttttgcacaacatgggggatcatgtaactcgccttgatcgttgggaaccggagctgaatgaagccataccaaacgacgagcgtgacaccacgatgcctgtagcaatggcaacaacgttgcgcaaactattaactggcgaactacttactctagcttcccggcaacaattaatagactggatggaggcggataaagttgcaggaccacttctgcgctcggcccttccggctggctggtttattgctgataaatctggagccggtgagcgtgggtctcgcggtatcattgcagcactggggccagatggtaagccctcccgtatcgtagttatctacacgacggggagtcaggcaactatggatgaacgaaatagacagatcgctgagataggtgcctcactgattaagcattggtaactgtcagaccaagtttactcatatatactttagattgatttaaaacttcatttttaatttaaaaggatctaggtgaagatcctttttgataatctcatgaccaaaatcccttaacgtgagttttcgttccactgagcgtcagaccccgtagaaaagatcaaaggatcttcttgagatcctttttttctgcgcgtaatctgctgcttgcaaacaaaaaaaccaccgctaccagcggtggtttgtttgccggatcaagagctaccaactctttttccgaaggtaactggcttcagcagagcgcagataccaaatactgtccttctagtgtagccgtagttaggccaccacttcaagaactctgtagcaccgcctacatacctcgctctgctaatcctgttaccagtggctgctgccagtggcgataagtcgtgtcttaccgggttggactcaagacgatagttaccggataaggcgcagcggtcgggctgaacggggggttcgtgcacacagcccagcttggagcgaacgacctacaccgaactgagatacctacagcgtgagcattgagaaagcgccacgcttcccgaagggagaaaggcggacaggtatccggtaagcggcagggtcggaacaggagagcgcacgagggagcttccagggggaaacgcctggtatctttatagtcctgtcgggtttcgccacctctgacttgagcgtcgatttttgtgatgctcgtcaggggggcggagcctatggaaaaacgccagcaacgcggcctttttacggttcctggccttttgctggccttttgctcacatgttctttcctgcgttatcccctgattctgtggataaccgtattaccgcctttgagtgagctgataccgctcgccgcagccgaacgaccgagcgcagcgagtcagtgagcgaggaagcggaagagcgcccaatacgcaaaccgcctctccccgcgcgttggccgattcattaatgcagctggcacgacaggtttcccgactggaaagcgggcagtgagcgcaacgcaattaatgtgagttagctcactcattaggcaccccaggctttacactttatgcttccggctcgtatgttgtgtggaattgtgagcggataacaatttcacacaggaaacagctatgaccatgattacgccaagcttacgcgtcctggcattatgcccagtacatgaccttatgggactttcctacttggcagtacatctacgtattagtcatcgctattaccatggtgatgcggttttggcagtacatcaatgggcgtggatagcggtttgactcacggggatttccaagtctccaccccattgacgtcaatgggagtttgttttggcaccaaaatcaacgggactttccaaaatgtcgtaacaactccgccccattgacgcaaatgggcggtaggcgtgtacggtgggaggtctatataagcagagctcgtttagtgaaccgtgg

SEQ ID NO: 21 - DNA, 10849 bp, Artificial Sequence
  Vector with soluble s4-1BBL ectodomain construct
gttgacattgattattgactagttattaatagtaatcaattacggggtcattagttcatagcccatatatggagttccgcgttacataacttacggtaaatggcccgcctggctgaccgcccaacgacccccgcccattgacgtcaataatgacgtatgttcccatagtaacgccaatagggactttccattgacgtcaatgggtggagtatttacggtaaactgcccacttggcagtacatcaagtgtatcatatgccaagtccgccccctattgacgtcaatgacggtaaatggcccgcctggcattatgcccagtacatgaccttacgggactttcctacttggcagtacatctacgtattagtcatcgctattaccatggtgatgcggttttggcagtacaccaatgggcgtggatagcggtttgactcacggggatttccaagtctccaccccattgacgtcaatgggagtttgttttggcaccaaaatcaacgggactttccaaaatgtcgtaataaccccgccccgttgacgcaaatgggcggtaggcgtgtacggtgggaggtctatataagcagagctcgtttagtgaaccgtcagatctctagaagctgggtaccagctgctagcaagcttgccaccatgcccatggggtctctgcaaccgctggccaccttgtacctgctggggatgctggtcgcttcctgcctcggaggctctggctccaactggagccacccccagttcgagaagggaggttctgggggccatcaccatcaccatcacggcggttcagggggaggatccttggacctgcggcagggcatgtttgcgcagctggtggcccaaaatgttctgctgatcgatgggcccctgagctggtacagtgacccaggcctggcaggcgtgtccctgacggggggcctgagctacaaagaggacacgaaggagctggtggtggccaaggctggagtctactatgtcttctttcaactagagctgcggcgcgtggtggccggcgagggctcaggctccgtttcacttgcgctgcacctgcagccactgcgctctgctgctggggccgccgccctggctttgaccgtggacctgccacccgcctcctccgaggctcggaactcggccttcggtttccagggccgcttgctgcacctgagtgccggccagcgcctgggcgtccatcttcacactgaggccagggcacgccatgcctggcagcttacccagggcgccacagtcttgggactcttccgggtgacccccgaaatcccagccggactcccttcaccgaggtcggaataagcggccgcagatccagacatgataagatacattgatgagtttggacaaaccacaactagaatgcagtgaaaaaaatgctttatttgtgaaatttgtgatgctattgctttatttgtaaccattataagctgcaataaacaagttaacaacaacaattgcattcattttatgtttcaggttcagggggaggtgtgggaggttttttaaagcaagtaaaacctctacaaatgtggtatggctgattatgatccggctgcctcgcgcgtttcggtgatgacggtgaaaacctctgacacatgcagctcccggagacggtcacagcttgtctgtaagcggatgccgggagcagacaagcccgtcaggcgtcagcgggtgttggcgggtgtcggggcgcagccatgaggtcgactctagaggatcgatgccccgccccggacgaactaaacctgactacgacatctctgccccttcttcgcggggcagtgcatgtaatcccttcagttggttggtacaacttgccaactgggccctgttccacatgtgacacggggggggaccaaacacaaaggggttctctgactgtagttgacatccttataaatggatgtgcacatttgccaacactgagtggctttcatcctggagcagactttgcagtctgtggactgcaacacaacattgcctttatgtgtaactcttggctgaagctcttacaccaatgctgggggacatgtacctcccaggggcccaggaagactacgggaggctacaccaacgtcaatcagaggggcctgtgtagctaccgataagcggaccctcaagagggcattagcaatagtgtttataaggcccccttgttaaccctaaacgggtagcatatgcttcccgggtagtagtatatactatccagactaaccctaattcaatagcatatgttacccaacgggaagcatatgctatcgaattagggttagtaaaagggtcctaaggaacagcgatatctcccaccccatgagctgtcacggttttatttacatggggtcaggattccacgagggtagtgaaccattttagtcacaagggcagtggctgaagatcaaggagcgggcagtgaactctcctgaatcttcgcctgcttcttcattctccttcgtttagctaatagaataactgctgagttgtgaacagtaaggtgtatgtgaggtgctcgaaaacaaggtttcaggtgacgcccccagaataaaatttggacggggggttcagtggtggcattgtgctatgacaccaatataaccctcacaaaccccttgggcaataaatactagtgtaggaatgaaacattctgaatatctttaacaatagaaatccatggggtggggacaagccgtaaagactggatgtccatctcacacgaatttatggctatgggcaacacataatcctagtgcaatatgatactggggttattaagatgtgtcccaggcagggaccaagacaggtgaaccatgttgttacactctatttgtaacaaggggaaagagagtggacgccgacagcagcggactccactggttgtctctaacacccccgaaaattaaacggggctccacgccaatggggcccataaacaaagacaagtggccactcttttttttgaaattgtggagtgggggcacgcgtcagcccccacacgccgccctgcggttttggactgtaaaataagggtgtaataacttggctgattgtaaccccgctaaccactgcggtcaaaccacttgcccacaaaaccactaatggcaccccggggaatacctgcataagtaggtgggcgggccaagataggggcgcgattgctgcgatctggaggacaaattacacacacttgcgcctgagcgccaagcacagggttgttggtcctcatattcacgaggtcgctgagagcacggtgggctaatgttgccatgggtagcatatactacccaaatatctggatagcatatgctatcctaatctatatctgggtagcataggctatcctaatctatatctgggtagcatatgctatcctaatctatatctgggtagtatatgctatcctaatttatatctgggtagcataggctatcctaatctatatctgggtagcatatgctatcctaatctatatctgggtagtatatgctatcctaatctgtatccgggtagcatatgctatcctaatagagattagggtagtatatgctatcctaatttatatctgggtagcatatactacccaaatatctggatagcatatgctatcctaatctatatctgggtagcatatgctatcctaatctatatctgggtagcataggctatcctaatctatatctgggtagcatatgctatcctaatctatatctgggtagtatatgctatcctaatttatatctgggtagcataggctatcctaatctatatctgggtagcatatgctatcctaatctatatctgggtagtatatgctatcctaatctgtatccgggtagcatatgctatcctcatgcatatacagtcagcatatgatacccagtagtagagtgggagtgctatcctttgcatatgccgccacctcccaagggggcgtgaattttcgctgcttgtccttttcctgctggttgctcccattcttaggtgaatttaaggaggccaggctaaagccgtcgcatgtctgattgctcaccaggtaaatgtcgctaatgttttccaacgcgagaaggtgttgagcgcggagctgagtgacgtgacaacatgggtatgcccaattgccccatgttgggaggacgaaaatggtgacaagacagatggccagaaatacaccaacagcacgcatgatgtctactggggatttattctttagtgcgggggaatacacggcttttaatacgattgagggcgtctcctaacaagttacatcactcctgcccttcctcaccctcatctccatcacctccttcatctccgtcatctccgtcatcaccctccgcggcagccccttccaccataggtggaaaccagggaggcaaatctactccatcgtcaaagctgcacacagtcaccctgatattgcaggtaggagcgggctttgtcataacaaggtccttaatcgcatccttcaaaacctcagcaaatatatgagtttgtaaaaagaccatgaaataacagacaatggactcccttagcgggccaggttgtgggccgggtccaggggccattccaaaggggagacgactcaatggtgtaagacgacattgtggaatagcaagggcagttcctcgccttaggttgtaaagggaggtcttactacctccatatacgaacacaccggcgacccaagttccttcgtcggtagtcctttctacgtgactcctagccaggagagctcttaaaccttctgcaatgttctcaaatttcgggttggaacctccttgaccacgatgctttccaaaccaccctccttttttgcgcctgcctccatcaccctgaccccggggtccagtgcttgggccttctcctgggtcatctgcggggccctgctctatcgctcccgggggcacgtcaggctcaccatctgggccaccttcttggtggtattcaaaataatcggcttcccctacagggtggaaaaatggccttctacctggagggggcctgcgcggtggagacccggatgatgatgactgactactgggactcctgggcctcttttctccacgtccacgacctctccccctggctctttcacgacttccccccctggctctttcacgtcctctaccccggcggcctccactacctcctcgaccccggcctccactacctcctcgaccccggcctccactgcctcctcgaccccggcctccacctcctgctcctgcccctcctgctcctgcccctcctcctgctcctgcccctcctgcccctcctgctcctgcccctcctgcccctcctgctcctgcccctcctgcccctcctgctcctgcccctcctgcccctcctcctgctcctgcccctcctgcccctcctcctgctcctgcccctcctgcccctcctgctcctgcccctcctgcccctcctgctcctgcccctcctgcccctcctgctcctgcccctcctgctcctgcccctcctgctcctgcccctcctgctcctgcccctcctgcccctcctgcccctcctcctgctcctgcccctcctgctcctgcccctcctgcccctcctgcccctcctgctcctgcccctcctcctgctcctgcccctcctgcccctcctgcccctcctcctgctcctgcccctcctgcccctcctcctgctcctgcccctcctcctgctcctgcccctcctgcccctcctgcccctcctcctgctcctgcccctcctgcccctcctcctgctcctgcccctcctcctgctcctgcccctcctgcccctcctgcccctcctcctgctcctgcccctcctcctgctcctgcccctcctgcccctcctgcccctcctgcccctcctcctgctcctgcccctcctcctgctcctgcccctcctgctcctgcccctcccgctcctgctcctgctcctgttccaccgtgggtccctttgcagccaatgcaacttggacgtttttggggtctccggacaccatctctatgtcttggccctgatcctgagccgcccggggctcctggtcttccgcctcctcgtcctcgtcctcttccccgtcctcgtccatggttatcaccccctcttctttgaggtccactgccgccggagccttctggtccagatgtgtctcccttctctcctaggccatttccaggtcctgtacctggcccctcgtcagacatgattcacactaaaagagatcaatagacatctttattagacgacgctcagtgaatacagggagtgcagactcctgccccctccaacagcccccccaccctcatccccttcatggtcgctgtcagacagatccaggtctgaaaattccccatcctccgaaccatcctcgtcctcatcaccaattactcgcagcccggaaaactcccgctgaacatcctcaagatttgcgtcctgagcctcaagccaggcctcaaattcctcgtccccctttttgctggacggtagggatggggattctcgggacccctcctcttcctcttcaaggtcaccagacagagatgctactggggcaacggaagaaaagctgggtgcggcctgtgaggatcagcttatcgatgataagctgtcaaacatgagaattcttgaagacgaaagggcctcgtgatacgcctatttttataggttaatgtcatgataataatggtttcttagacgtcaggtggcacttttcggggaaatgtgcgcggaacccctatttgtttatttttctaaatacattcaaatatgtatccgctcatgagacaataaccctgataaatgcttcaataatattgaaaaaggaagagtatgagtattcaacatttccgtgtcgcccttattcccttttttgcggcattttgccttcctgtttttgctcacccagaaacgctggtgaaagtaaaagatgctgaagatcagttgggtgcacgagtgggttacatcgaactggatctcaacagcggtaagatccttgagagttttcgccccgaagaacgttttccaatgatgagcacttttaaagttctgctatgtggcgcggtattatcccgtgttgacgccgggcaagagcaactcggtcgccgcatacactattctcagaatgacttggttgagtactcaccagtcacagaaaagcatcttacggatggcatgacagtaagagaattatgcagtgctgccataaccatgagtgataacactgcggccaacttacttctgacaacgatcggaggaccgaaggagctaaccgcttttttgcacaacatgggggatcatgtaactcgccttgatcgttgggaaccggagctgaatgaagccataccaaacgacgagcgtgacaccacgatgcctgcagcaatggcaacaacgttgcgcaaactattaactggcgaactacttactctagcttcccggcaacaattaatagactggatggaggcggataaagttgcaggaccacttctgcgctcggcccttccggctggctggtttattgctgataaatctggagccggtgagcgtgggtctcgcggtatcattgcagcactggggccagatggtaagccctcccgtatcgtagttatctacacgacggggagtcaggcaactatggatgaacgaaatagacagatcgctgagataggtgcctcactgattaagcattggtaactgtcagaccaagtttactcatatatactttagattgatttaaaacttcatttttaatttaaaaggatctaggtgaagatcctttttgataatctcatgaccaaaatcccttaacgtgagttttcgttccactgagcgtcagaccccgtagaaaagatcaaaggatcttcttgagatcctttttttctgcgcgtaatctgctgcttgcaaacaaaaaaaccaccgctaccagcggtggtttgtttgccggatcaagagctaccaactctttttccgaaggtaactggcttcagcagagcgcagataccaaatactgtccttctagtgtagccgtagttaggccaccacttcaagaactctgtagcaccgcctacatacctcgctctgctaatcctgttaccagtggctgctgccagtggcgataagtcgtgtcttaccgggttggactcaagacgatagttaccggataaggcgcagcggtcgggctgaacggggggttcgtgcacacagcccagcttggagcgaacgacctacaccgaactgagatacctacagcgtgagctatgagaaagcgccacgcttcccgaagggagaaaggcggacaggtatccggtaagcggcagggtcggaacaggagagcgcacgagggagcttccagggggaaacgcctggtatctttatagtcctgtcgggtttcgccacctctgacttgagcgtcgatttttgtgatgctcgtcaggggggcggagcctatggaaaaacgccagcaacgcggcctttttacggttcctggccttttgctggccttgaagctgtccctgatggtcgtcatctacctgcctggacagcatggcctgcaacgcgggcatcccgatgccgccggaagcgagaagaatcataatggggaaggccatccagcctcgcgtcgcgaacgccagcaagacgtagcccagcgcgtcggccccgagatgcgccgcgtgcggctgctggagatggcggacgcgatggatatgttctgccaagggttggtttgcgcattcacagttctccgcaagaattgattggctccaattcttggagtggtgaatccgttagcgaggtgccgccctgcttcatccccgtggcccgttgctcgcgtttgctggcggtgtccccggaagaaatatatttgcatgtctttagttctatgatgacacaaaccccgcccagcgtcttgtcattggcgaattcgaacacgcagatgcagtcggggcggcgcggtccgaggtccacttcgcatattaaggtgacgcgtgtggcctcgaacaccgagcgaccctgcagcgacccgcttaacagcgtcaacagcgtgccgcagatcccggggggcaatgagatatgaaaaagcctgaactcaccgcgacgtctgtcgagaagtttctgatcgaaaagttcgacagcgtctccgacctgatgcagctctcggagggcgaagaatctcgtgctttcagcttcgatgtaggagggcgtggatatgtcctgcgggtaaatagctgcgccgatggtttctacaaagatcgttatgtttatcggcactttgcatcggccgcgctcccgattccggaagtgcttgacattggggaattcagcgagagcctgacctattgcatctcccgccgtgcacagggtgtcacgttgcaagacctgcctgaaaccgaactgcccgctgttctgcagccggtcgcggaggccatggatgcgatcgctgcggccgatcttagccagacgagcgggttcggcccattcggaccgcaaggaatcggtcaatacactacatggcgtgatttcatatgcgcgattgctgatccccatgtgtatcactggcaaactgtgatggacgacaccgtcagtgcgtccgtcgcgcaggctctcgatgagctgatgctttgggccgaggactgccccgaagtccggcacctcgtgcacgcggatttcggctccaacaatgtcctgacggacaatggccgcataacagcggtcattgactggagcgaggcgatgttcggggattcccaatacgaggtcgccaacatcttcttctggaggccgtggttggcttgtatggagcagcagacgcgctacttcgagcggaggcatccggagcttgcaggatcgccgcggctccgggcgtatatgctccgcattggtcttgaccaactctatcagagcttggttgacggcaatttcgatgatgcagcttgggcgcagggtcgatgcgacgcaatcgtccgatccggagccgggactgtcgggcgtacacaaatcgcccgcagaagcgcggccgtctggaccgatggctgtgtagaagtactcgccgatagtggaaaccgacgccccagcactcgtccggatcgggagatgggggaggctaactgaaacacggaaggagacaataccggaaggaacccgcgctatgacggcaataaaaagacagaataaaacgcacgggtgttgggtcgtttgttcataaacgcggggttcggtcccagggctggcactctgtcgataccccaccgagaccccattggggccaatacgcccgcgtttcttccttttccccaccccaccccccaagttcgggtgaaggcccagggctcgcagccaacgtcggggcggcaggccctgccatagccactggccccgtgggttagggacggggtcccccatggggaatggtttatggttcgtgggggttattattttgggcgttgcgtggggtcaggtccacgactggactgagcagacagacccatggtttttggatggcctgggcatggaccgcatgtactggcgcgacacgaacaccgggcgtctgtggctgccaaacacccccgacccccaaaaaccaccgcgcggatttctggcgtgccaagctagtcgaccaattctcatgtttgacagcttatcatcgcagatccgggcaacgttgttgccattgctgcaggcgcagaactggtaggtatggaagatctatacattgaatcaatattggcaattagccatattagtcattggttatatagcataaatcaatattggctattggccattgcatacgttgtatctatatcataatatgtacatttatattggctcatgtccaatatgaccgccat

SEQ ID NO: 22 - DNA, 20304 bp, Artificial Sequence
  Vector with soluble s4-1BBL ectodomain construct
accaaacaaagttgggtaaggatagttcaatcaatgatcatcttctagtgcacttaggattcaagatcctattatcagggacaagagcaggattagggatatctcgaggcgcgtgccaccatgcccatggggtctctgcaaccgctggccaccttgtacctgctggggatgctggtcgcttcctgcctcggattggacctgcggcagggcatgtttgcgcagctggtggcccaaaatgttctgctgatcgatgggcccctgagctggtacagtgacccaggcctggcaggcgtgtccctgacggggggcctgagctacaaagaggacacgaaggagctggtggtggccaaggctggagtctactatgtcttctttcaactagagctgcggcgcgtggtggccggcgagggctcaggctccgtttcacttgcgctgcacctgcagccactgcgctctgctgctggggccgccgccctggctttgaccgtggacctgccacccgcctcctccgaggctcggaactcggccttcggtttccagggccgcttgctgcacctgagtgccggccagcgcctgggcgtccatcttcacactgaggccagggcacgccatgcctggcagcttacccagggcgccacagtcttgggactcttccgggtgacccccgaaatcccagccggactcccttcaccgaggtcggaataaacgcgccatccatcattgttataaaaaacttaggattcaagatcctattatcagggacaagagcaggattagggatatccgagatggccacacttttaaggagcttagcattgttcaaaagaaacaaggacaaaccacccattacatcaggatccggtggagccatcagaggaatcaaacacattattatagtaccaatccctggagattcctcaattaccactcgatccagacttctggaccggttggtcaggttaattggaaacccggatgtgagcgggcccaaactaacaggggcactaataggtatattatccttatttgtggagtctccaggtcaattgattcagaggatcaccgatgaccctgacgttagcataaggctgttagaggttgtccagagtgaccagtcacaatctggccttaccttcgcatcaagaggtaccaacatggaggatgaggcggaccaatacttttcacatgatgatccaattagtagtgatcaatccaggttcggatggttcgagaacaaggaaatctcagatattgaagtgcaagaccctgagggattcaacatgattctgggtaccatcctagcccaaatttgggtcttgctcgcaaaggcggttacggccccagacacggcagctgattcggagctaagaaggtggataaagtacacccaacaaagaagggtggttggtgaatttagattggagagaaaatggttggatgtggtgaggaacaggattgccgaggacctctccttacgccgattcatggtcgctctaatcctggatatcaagagaacacccggaaacaaacccaggattgctgaaatgatatgtgacattgatacatatatcgtagaggcaggattagccagttttatcctgactattaagtttgggatagaaactatgtatcctgctcttggactgcatgaatttgctggtgagttatccacacttgagtccttgatgaacctttaccagcaaatgggggaaactgcaccctacatggtaatcctggagaactcaattcagaacaagttcagtgcaggatcataccctctgctctggagctatgccatgggagtaggagtggaacttgaaaactccatgggaggtttgaactttggccgatcttactttgatccagcatattttagattagggcaagagatggtaaggaggtcagctggaaaggtcagttccacattggcatctgaactcggtatcactgccgaggatgcaaggcttgtttcagagattgcaatgcatactactgaggacaagatcagtagagcggttggacccagacaagcccaagtatcatttctacacggtgatcaaagtgagaatgagctaccgagattggggggcaaggaagataggagggtcaaacagagtcgaggagaagccagggagagctacagagaaaccgggcccagcagagcaagtgatgcgagagctgcccatcttccaaccggcacacccctagacattgacactgcaacggagtccagccaagatccgcaggacagtcgaaggtcagctgacgccctgcttaggctgcaagccatggcaggaatctcggaagaacaaggctcagacacggacacccctatagtgtacaatgacagaaatcttctagactaggtgcgagaggccgagggccagaacaacatccgcctaccctccatcattgttataaaaaacttaggaaccaggtccacacagccgccagcccatcaaccatccactcccacgattggagccaatggcagaagagcaggcacgccatgtcaaaaacggactggaatgcatccgggctctcaaggccgagcccatcggctcactggccatcgaggaagctatggcagcatggtcagaaatatcagacaacccaggacaggagcgagccacctgcagggaagagaaggcaggcagttcgggtctcagcaaaccatgcctctcagcaattggatcaactgaaggcggtgcacctcgcatccgcggtcagggacctggagagagcgatgacgacgctgaaactttgggaatccccccaagaaatctccaggcatcaagcactgggttacagtgttattacgtttatgatcacagcggtgaagcggttaagggaatccaagatgctgactctatcatggttcaatcaggccttgatggtgatagcaccctctcaggaggagacaatgaatctgaaaacagcgatgtggatattggcgaacctgataccgagggatatgctatcactgaccggggatctgctcccatctctatggggttcagggcttctgatgttgaaactgcagaaggaggggagatccacgagctcctgagactccaatccagaggcaacaactttccgaagcttgggaaaactctcaatgttcctccgcccccggaccccggtagggccagcacttccgggacacccattaaaaagggcacagacgcgagattagcctcatttggaacggagatcgcgtctttattgacaggtggtgcaacccaatgtgctcgaaagtcaccctcggaaccatcagggccaggtgcacctgcggggaatgtccccgagtgtgtgagcaatgccgcactgatacaggagtggacacccgaatctggtaccacaatctccccgagatcccagaataatgaagaagggggagactattatgatgatgagctgttctctgatgtccaagatattaaaacagccttggccaaaatacacgaggataatcagaagataatctccaagctagaatcactgctgttattgaagggagaagttgagtcaattaagaagcagatcaacaggcaaaatatcagcatatccaccctggaaggacacctctcaagcatcatgatcgccattcctggacttgggaaggatcccaacgaccccactgcagatgtcgaaatcaatcccgacttgaaacccatcataggcagagattcaggccgagcactggccgaagttctcaagaaacccgttgccagccgacaactccaaggaatgacaaatggacggaccagttccagaggacagctgctgaaggaatttcagctaaagccgatcgggaaaaagatgagctcagccgtcgggtttgttcctgacaccggccctgcatcacgcagtgtaatccgctccattataaaatccagccggctagaggaggatcggaagcgttacctgatgactctccttgatgatatcaaaggagccaatgatcttgccaagttccaccagatgctgatgaagataataatgaagtagctacagctcaacttacctgccaaccccatgccagtcgacccaactagtacaacctaaatccattataaaaaacttaggagcaaagtgattgcctcccaagttccacaatgacagagacctacgacttcgacaagtcggcatgggacatcaaagggtcgatcgctccgatacaacccaccacctacagtgatggcaggctggtgccccaggtcagagtcatagatcctggtctaggcgacaggaaggatgaatgctttatgtacatgtttctgctgggggttgttgaggacagcgattccctagggcctccaatcgggcgagcatttgggtccctgcccttaggtgttggcagatccacagcaaagcccgaaaaactcctcaaagaggccactgagcttgacatagttgttagacgtacagcagggctcaatgaaaaactggtgttctacaacaacaccccactaactctcctcacaccttggagaaaggtcctaacaacagggagtgtcttcaacgcaaaccaagtgtgcaatgcggttaatctgataccgctcgataccccgcagaggttccgtgttgtttatatgagcatcacccgtctttcggataacgggtattacaccgttcctagaagaatgctggaattcagatcggtcaatgcagtggccttcaacctgctggtgacccttaggattgacaaggcgataggccctgggaagatcatcgacaatacagagcaacttcctgaggcaacatttatggtccacatcgggaacttcaggagaaagaagagtgaagtctactctgccgattattgcaaaatgaaaatcgaaaagatgggcctggtttttgcacttggtgggatagggggcaccagtcttcacattagaagcacaggcaaaatgagcaagactctccatgcacaactcgggttcaagaagaccttatgttacccgctgatggatatcaatgaagaccttaatcgattactctggaggagcagatgcaagatagtaagaatccaggcagttttgcagccatcagttcctcaagaattccgcatttacgacgacgtgatcataaatgatgaccaaggactattcaaagttctgtagaccgtagtgcccagcaatgcccgaaaacgacccccctcacaatgacagccagaaggcccggacaaaaaagccccctccgaaagactccacggaccaagcgagaggccagccagcagccgacggcaagcgcgaacaccaggcggccccagcacagaacagccccgacacaaggccaccaccagccaccccaatctgcatcctcctcgtgggacccccgaggaccaacccccaaggctgcccccgatccaaaccaccaaccgcatccccaccacccccgggaaagaaacccccagcaattggaaggcccctccccctcttcctcaacacaagaactccacaaccgaaccgcacaagcgaccgaggtgacccaaccgcaggcatccgactccctagacagatcctctctccccggcaaactaaacaaaacttagggccaaggaacatacacacccaacagaacccagaccccggcccacggcgccgcgcccccaacccccgacaaccagagggagcccccaaccaatcccgccggctcccccggtgcccacaggcagggacaccaacccccgaacagacccagcacccaaccatcgacaatccaagacgggggggcccccccaaaaaaaggcccccaggggccgacagccagcaccgcgaggaagcccacccaccccacacacgaccacggcaaccaaaccagaacccagaccaccctgggccaccagctcccagactcggccatcaccccgcagaaaggaaaggccacaacccgcgcaccccagccccgatccggcggggagccacccaacccgaaccagcacccaagagcgatccccgaaggacccccgaaccgcaaaggacaccagtatcccacagcctctccaagtcccccggtctcctcctcttctcgaagggaccaaaagatcaatccaccacacccgacgacactcaactccccacccctaaaggagacaccgggaatcccagaatcaagactcatccaatgtccatcatgggtctcaaggtgaacgtctctgccatattcatggcagtactgttaactctccaaacacccaccggtcaaatccattggggcaatctctctaagataggggtggtaggaataggaagtgcaagctacaaagttatgactcgttccagccatcaatcattagtcataaaattaatgcccaatataactctcctcaataactgcacgagggtagagattgcagaatacaggagactactgagaacagttttggaaccaattagagatgcacttaatgcaatgacccagaatataagaccggttcagagtgtagcttcaagtaggagacacaagagatttgcgggagtagtcctggcaggtgcggccctaggcgttgccacagctgctcagataacagccggcattgcacttcaccagtccatgctgaactctcaagccatcgacaatctgagagcgagcctggaaactactaatcaggcaattgaggcaatcagacaagcagggcaggagatgatattggctgttcagggtgtccaagactacatcaataatgagctgataccgtctatgaaccaactatcttgtgatttaatcggccagaagctcgggctcaaattgctcagatactatacagaaatcctgtcattatttggccccagtttacgggaccccatatctgcggagatatctatccaggctttgagctatgcgcttggaggagacatcaataaggtgttagaaaagctcggatacagtggaggtgatttactgggcatcttagagagcggaggcatcaaggcccggataactcacgtcgacacagagtcctacttcattgtcctcagtatagcctatccgacgctgtccgagattaagggggtgattgtccaccggctagagggggtctcgtacaacataggctctcaagagtggtataccactgtgcccaagtatgttgcaacccaagggtaccttatctcgaattttgatgagtcatcgtgtactttcatgccagaggggactgtgtgcagccaaaatgccttgtacccgatgagtcctctgctccaagaatgcctccgggggtacaccaagtcctgtgctcgtacactcgtatccgggtcttttgggaaccggttcattttatcacaagggaacctaatagccaattgtgcatcaatcctttgcaagtgttacacaacaggaacgatcattaatcaagaccctgacaagatcctaacatacattgctgccgatcactgcccggtagtcgaggtgaacggcgtgatcatccaagtcgggagcaggaggtatccagacgctgtgtacttgcacagaattgacctcggtcctcccatatcattggagaggttggacgtagggacaaatctggggaatgcaattgctaagttggaggatgccaaggaattgttggagtcatcggaccagatattgaggagtatgaaaggtttatcgagcactagcatagtctacatcctgattgcagtgtgtcttggagggttgatagggatccccgctttaatatgttgctgcagggggcgttgtaacaaaaagggagaacaagttggtatgtcaagaccaggcctaaagcctgatcttacgggaacatcaaaatcctatgtaaggtcgctctgatcctctacaactcttgaaacacaaatgtcccacaagtctcctcttcgtcatcaagcaaccaccgcacccagcatcaagcccacctgaaattatctccggcttccctctggccgaacaatatcggtagttaattaaaacttagggtgcaagatcatccacaatgtcaccacaacgagaccggataaatgccttctacaaagataacccccatcccaagggaagtaggatagtcattaacagagaacatcttatgattgatagaccttatgttttgctggctgttctgtttgtcatgtttctgagcttgatcgggttgctagccattgcaggcattagacttcatcgggcagccatctacaccgcagagatccataaaagcctcagcaccaatctagatgtaactaactcaatcgagcatcaggtcaaggacgtgctgacaccactcttcaaaatcatcggtgatgaagtgggcctgaggacacctcagagattcactgacctagtgaaattcatctctgacaagatcaagttccttaatccggatagggagtacgacttcagagatctcacttggtgtatcaacccgccagagagaatcaaattggattatgatcaatactgtgcagatgtggctgctgaagagctcatgaatgcattggtgaactcaactctactggagaccagaacaaccaatcagttcctagctgtctcaaagggaaactgctcagggcccactacaatcagaggtcaattctcaaacatgtcgctgtccctgttagacttgtatttaggtcgaggttacaatgtgtcatctatagtcactatgacatcccagggaatgtatgggggaacttacctagtggaaaagcctaatctgagcagcaaaaggtcagagttgtcacaactgagcatgtaccgagtgtttgaagtaggtgttatcagaaatccgggtttgggggctccggtgttccatatgacaaactatcttgagcaaccagtcagtaatgatctcagcaactgtatggtggctttgggggagctcaaactcgcagccctttgtcacggggaagattctatcacaattccctatcagggatcagggaaaggtgtcagcttccagctcgtcaagctaggtgtctggaaatccccaaccgacatgcaatcctgggtccccttatcaacggatgatccagtgatagacaggctttacctctcatctcacagaggtgttatcgctgacaatcaagcaaaatgggctgtcccgacaacacgaacagatgacaagttgcgaatggagacatgcttccaacaggcgtgtaagggtaaaatccaagcactctgcgagaatcccgagtgggcaccattgaaggataacaggattccttcatacggggtcttgtctgttgatctgagtctgacagttgagcttaaaatcaaaattgcttcgggattcgggccattgatcacacacggttcagggatggacctatacaaatccaaccacaacaatgtgtattggctgactatcccgccaatgaagaacctagccttaggtgtaatcaacacattggagtggataccgagattcaaggttagtccctacctcttcactgtcccaattaaggaagcaggcgaagactgccatgccccaacatacctacctgcggaggtggatggtgatgtcaaactcagttccaatctggtgattctacctggtcaagatctccaatatgttttggcaacctacgatacttccagggttgaacatgctgtggtttattacgtttacagcccaagccgctcattttcttacttttatccttttaggttgcctataaagggggtccccatcgaattacaagtggaatgcttcacatgggaccaaaaactctggtgccgtcacttctgtgtgcttgcggactcagaatctggtggacatatcactcactctgggatggtgggcatgggagtcagctgcacagtcacccgggaagatggaaccaatcgcagatagggctgctagtgaaccaatcacatgatgtcacccagacatcaggcatacccactagtgtgaaatagacatcagaattaagaaaaacgtagggtccaagtggttccccgttatggactcgctatctgtcaaccagatcttataccctgaagttcacctagatagcccgatagttaccaataagatagtagccatcctggagtatgctcgagtccctcacgcttacagcctggaggaccctacactgtgtcagaacatcaagcaccgcctaaaaaacggattttccaaccaaatgattataaacaatgtggaagttgggaatgtcatcaagtccaagcttaggagttatccggcccactctcatattccatatccaaattgtaatcaggatttatttaacatagaagacaaagagtcaacgaggaagatccgtgaactcctcaaaaaggggaattcgctgtactccaaagtcagtgataaggttttccaatgcttaagggacactaactcacggcttggcctaggctccgaattgagggaggacatcaaggagaaagttattaacttgggagtttacatgcacagctcccagtggtttgagccctttctgttttggtttacagtcaagactgagatgaggtcagtgattaaatcacaaacccatacttgccataggaggagacacacacctgtattcttcactggtagttcagttgagttgctaatctctcgtgaccttgttgctataatcagtaaagagtctcaacatgtatattacctgacatttgaactggttttgatgtattgtgatgtcatagaggggaggttaatgacagagaccgctatgactattgatgctaggtatacagagcttctaggaagagtcagatacatgtggaaactgatagatggtttcttccctgcactcgggaatccaacttatcaaattgtagccatgctggagcctctttcacttgcttacctgcagctgagggatataacagtagaactcagaggtgctttccttaaccactgctttactgaaatacatgatgttcttgaccaaaacgggttttctgatgaaggtacttatcatgagttaattgaagctctagattacattttcataactgatgacatacatctgacaggggagattttctcatttttcagaagtttcggccaccccagacttgaagcagtaacggctgctgaaaatgttaggaaatacatgaatcagcctaaagtcattgtgtatgagactctgatgaaaggtcatgccatattttgtggaatcataatcaacggctatcgtgacaggcacggaggcagttggccaccgctgaccctccccctgcatgctgcagacacaatccggaatgctcaagcttcaggtgaagggttaacacatgagcagtgcgttgataactggaaatcttttgctggagtgaaatttggctgctttatgcctcttagcctggatagtgatctgacaatgtacctaaaggacaaggcacttgctgctctccaaagggaatgggattcagtttacccgaaagagttcctgcgttacgaccctcccaagggaaccgggtcacggaggcttgtagatgttttccttaatgattcgagctttgacccatatgatgtgataatgtatgttgtaagtggagcttacctccatgaccctgagttcaacctgtcttacagcctgaaagaaaaggagatcaaggaaacaggtagactttttgctaaaatgacttacaaaatgagggcatgccaagtgattgctgaaaatctaatctcaaacgggattggcaaatattttaaggacaatgggatggccaaggatgagcacgatttgactaaggcactccacactctagctgtctcaggagtccccaaagatctcaaagaaagtcacaggggggggccagtcttaaaaacctactcccgaagcccagtccacacaagtaccaggaacgtgagagcagcaaaagggtttatagggttccctcaagtaattcggcaggaccaagacactgatcatccggagaatatggaagcttacgagacagtcagtgcatttatcacgactgatctcaagaagtactgccttaattggagatatgagaccatcagcttgtttgcacagaggctaaatgagatttacggattgccctcatttttccagtggctgcataagaggcttgagacctctgtcctgtatgtaagtgaccctcattgcccccccgaccttgacgcccatatcccgttatataaagtccccaatgatcaaatcttcattaagtaccctatgggaggtatagaagggtattgtcagaagctgtggaccatcagcaccattccctatctatacctggctgcttatgagagcggagtaaggattgcttcgttagtgcaaggggacaatcagaccatagccgtaacaaaaagggtacccagcacatggccctacaaccttaagaaacgggaagctgctagagtaactagagattactttgtaattcttaggcaaaggctacatgatattggccatcacctcaaggcaaatgagacaattgtttcatcacatttttttgtctattcaaaaggaatatattatgatgggctacttgtgtcccaatcactcaagagcatcgcaagatgtgtattctggtcagagactatagttgatgaaacaagggcagcatgcagtaatattgctacaacaatggctaaaagcatcgagagaggttatgaccgttaccttgcatattccctgaacgtcctaaaagtgatacagcaaattctgatctctcttggcttcacaatcaattcaaccatgacccgggatgtagtcatacccctcctcacaaacaacgacctcttaataaggatggcactgttgcccgctcctattggggggatgaattatctgaatatgagcaggctgtttgtcagaaacatcggtgatccagtaacatcatcaattgctgatctcaagagaatgattctcgcctcactaatgcctgaagagaccctccatcaagtaatgacacaacaaccgggggactcttcattcctagactgggctagcgacccttactcagcaaatcttgtatgtgtccagagcatcactagactcctcaagaacataactgcaaggtttgtcctgatccatagtccaaacccaatgttaaaaggattattccatgatgacagtaaagaagaggacgagggactggcggcattcctcatggacaggcatattatagtacctagggcagctcatgaaatcctggatcatagtgtcacaggggcaagagagtctattgcaggcatgctggataccacaaaaggcttgattcgagccagcatgaggaagggggggttaacctctcgagtgataaccagattgtccaattatgactatgaacaattcagagcagggatggtgctattgacaggaagaaagcgaaatgtcctcattgacaaagagtcatgttcagtgcagctggcgagagctctaagaagccatatgtgggcgaggctagctcgaggacggcctatttacggccttgaggtccctgatgtactagaatctatgcgaggccaccttattcggcgtcatgagacatgtgtcatctgcgagtgtggatcagtcaactacggatggttttttgtcccctcgggttgccaactggatgatattgacaaggaaacatcatccttgagagtcccatatattggttctaccactgatgagagaacagacatgaagcttgccttcgtaagagccccaagtcgatccttgcgatctgctgttagaatagcaacagtgtactcatgggcttacggtgatgatgatagctcttggaacgaagcctggttgttggctaggcaaagggccaatgtgagcctggaggagctaagggtgatcactcccatctcaacttcgactaatttagcgcataggttgagggatcgtagcactcaagtgaaatactcaggtacatcccttgtccgagtggcgaggtataccacaatctccaacgacaatctctcatttgtcatatcagataagaaggttgatactaactttatataccaacaaggaatgcttctagggttgggtgttttagaaacattgtttcgactcgagaaagataccggatcatctaacacggtattacatcttcacgtcgaaacagattgttgcgtgatcccgatgatagatcatcccaggatacccagctcccgcaagctagagctgagggcagagctatgtaccaacccattgatatatgataatgcacctttaattgacagagatgcaacaaggctatacacccagagccataggaggcaccttgtggaatttgttacatggtccacaccccaactatatcacattttagctaagtccacagcactatctatgattgacctggtaacaaaatttgagaaggaccatatgaatgaaatttcagctctcataggggatgacgatatcaatagtttcataactgagtttctgctcatagagccaagattattcactatctacttgggccagtgtgcggccatcaattgggcatttgatgtacattatcatagaccatcagggaaatatcagatgggtgagctgttgtcatcgttcctttctagaatgagcaaaggagtgtttaaggtgcttgtcaatgctctaagccacccaaagatctacaagaaattctggcattgtggtattatagagcctatccatggtccttcacttgatgctcaaaacttgcacacaactgtgtgcaacatggtttacacatgctatatgacctacctcgacctgttgttgaatgaagagttagaagagttcacatttctcttgtgtgaaagcgacgaggatgtagtaccggacagattcgacaacatccaggcaaaacacttatgtgttctggcagatttgtactgtcaaccagggacctgcccaccaattcgaggtctaagaccggtagagaaatgtgcagttctaaccgaccatatcaaggcagaggctatgttatctccagcaggatcttcgtggaacataaatccaattattgtagaccattactcatgctctctgacttatctccggcgaggatcgatcaaacagataagattgagagttgatccaggattcattttcgacgccctcgctgaggtaaatgtcagtcagccaaagatcggcagcaacaacatctcaaatatgagcatcaaggctttcagacccccacacgatgatgttgcaaaattgctcaaagatatcaacacaagcaagcacaatcttcccatttcagggggcaatctcgccaattatgaaatccatgctttccgcagaatcgggttgaactcatctgcttgctacaaagctgttgagatatcaacattaattaggagatgccttgagccaggggaggacggcttgttcttgggtgagggatcgggttctatgttgatcacttataaggagatacttaaactaaacaagtgcttctataatagtggggtttccgccaattctagatctggtcaaagggaattagcaccctatccctccgaagttggccttgtcgaacacagaatgggagtaggtaatattgtcaaagtgctctttaacgggaggcccgaagtcacgtgggtaggcagtgtagattgcttcaatttcatagttagtaatatccctacctctagtgtggggtttatccattcagatatagagaccttgcctgacaaagatactatagagaagctagaggaattggcagccatcttatcgatggctctgctcctgggcaaaataggatcaatactggtgattaagcttatgcctttcagcggggattttgttcagggatttataagttatgtagggtctcattatagagaagtgaaccttgtataccctagatacagcaacttcatctctactgaatcttatttggttatgacagatctcaaggctaaccggctaatgaatcctgaaaagattaagcagcagataattgaatcatctgtgaggacttcacctggacttataggtcacatcctatccattaagcaactaagctgcatacaagcaattgtgggagacgcagttagtagaggtgatatcaatcctactctgaaaaaacttacacctatagagcaggtgctgatcaattgcgggttggcaattaacggacctaagctgtgcaaagaattgatccaccatgatgttgcctcagggcaagatggattgcttaattctatactcatcctctacagggagttggcaagattcaaagacaaccaaagaagtcaacaagggatgttccacgcttaccccgtattggtaagtagcaggcaacgagaacttatatctaggatcacccgcaaattctgggggcacattcttctttactccgggaacagaaagttgataaataagtttatccagaatctcaagtccggctatctgatactagacttacaccagaatatcttcgttaagaatctatccaagtcagagaaacagattattatgacggggggtttgaaacgtgagtgggtttttaaggtaacagtcaaggagaccaaagaatggtataagttagtcggatacagtgccctgattaaggactaattggttgaactccggaaccctaatcctgccctaggtggttaggcattatttgcaatatattaaagaaaactttgaaaatacgaagtttctattcccagctttgtctggtggccggcatggtcccagcctcctcgctggcgccggctgggcaacattccgaggggaccgtcccctcggtaatggcgaatgggacgcggccggtcgatcgacgatccggctgctaacaaagcccgaaaggaagctgagttggctgctgccaccgctgagcaataactagcataaccccttggggcctctaaacgggtcttgaggggttttttgctgaaaggaggaactatatccggatcgagatcaattctgtgagcgtatggcaaacgaaggaaaaatagttatagtagccgcactcgatgggacatttcaacgtaaaccgtttaataatattttgaatcttattccattatctgaaatggtggtaaaactaactgctgtgtgtatgaaatgctttaaggaggcttccttttctaaacgattgggtgaggaaaccgagatagaaataataggaggtaatgatatgtatcaatcggtgtgtagaaagtgttacatcgactcataatattatattttttatctaaaaaactaaaaataaacattgattaaattttaatataatacttaaaaatggatgttgtgtcgttagataaaccgtttatgtattttgaggaaattgataatgagttagattacgaaccagaaagtgcaaatgaggtcgcaaaaaaactgccgtatcaaggacagttaaaactattactaggagaattattttttcttagtaagttacagcgacacggtatattagatggtgccaccgtagtgtatataggatctgctcccggtacacatatacgttatttgagagatcatttctataatttaggagtgatcccgaaaggaagctgagttggctgctgccaccgctgagcaataactagcataaccccttggggcctctaaacgggtcttgaggggttttttgctgaaaggaggaacgcgcctgatgcggtattttctccttacgcatctgtgcggtatttcacaccgcatatatggtgcactctcagtacaatctgctctgatgccgcatagttaagccagccccgacacccgccaacacccgctgacgcgccctgacgggcttgtctgctcccggcatccgcttacagacaagctgtgaccgtctccgggagctgcatgtgtcagaggttttcaccgtcatcaccgaaacgcgcgagacgaaagggcctcgtgatacgcctatttttataggttaatgtcatgataataatggtttcttagacgtcaggtggcacttttcggggaaatgtgcgcggaacccctatttgtttatttttctaaatacattcaaatatgtatccgctcatgagacaataaccctgataaatgcttcaataatattgaaaaaggaagagtatgagtattcaacatttccgtgtcgcccttattcccttttttgcggcattttgccttcctgtttttgctcacccagaaacgctggtgaaagtaaaagatgctgaagatcagttgggtgcacgagtgggttacatcgaactggatctcaacagcggtaagatccttgagagttttcgccccgaagaacgttttccaatgatgagcacttttaaagttctgctatgtggcgcggtattatcccgtattgacgccgggcaagagcaactcggtcgccgcatacactattctcagaatgacttggttgagtactcaccagtcacagaaaagcatcttacggatggcatgacagtaagagaattatgcagtgctgccataaccatgagtgataacactgcggccaacttacttctgacaacgatcggaggaccgaaggagctaaccgcttttttgcacaacatgggggatcatgtaactcgccttgatcgttgggaaccggagctgaatgaagccataccaaacgacgagcgtgacaccacgatgcctgtagcaatggcaacaacgttgcgcaaactattaactggcgaactacttactctagcttcccggcaacaattaatagactggatggaggcggataaagttgcaggaccacttctgcgctcggcccttccggctggctggtttattgctgataaatctggagccggtgagcgtgggtctcgcggtatcattgcagcactggggccagatggtaagccctcccgtatcgtagttatctacacgacggggagtcaggcaactatggatgaacgaaatagacagatcgctgagataggtgcctcactgattaagcattggtaactgtcagaccaagtttactcatatatactttagattgatttaaaacttcatttttaatttaaaaggatctaggtgaagatcctttttgataatctcatgaccaaaatcccttaacgtgagttttcgttccactgagcgtcagaccccgtagaaaagatcaaaggatcttcttgagatcctttttttctgcgcgtaatctgctgcttgcaaacaaaaaaaccaccgctaccagcggtggtttgtttgccggatcaagagctaccaactctttttccgaaggtaactggcttcagcagagcgcagataccaaatactgtccttctagtgtagccgtagttaggccaccacttcaagaactctgtagcaccgcctacatacctcgctctgctaatcctgttaccagtggctgctgccagtggcgataagtcgtgtcttaccgggttggactcaagacgatagttaccggataaggcgcagcggtcgggctgaacggggggttcgtgcacacagcccagcttggagcgaacgacctacaccgaactgagatacctacagcgtgagcattgagaaagcgccacgcttcccgaagggagaaaggcggacaggtatccggtaagcggcagggtcggaacaggagagcgcacgagggagcttccagggggaaacgcctggtatctttatagtcctgtcgggtttcgccacctctgacttgagcgtcgatttttgtgatgctcgtcaggggggcggagcctatggaaaaacgccagcaacgcggcctttttacggttcctggccttttgctggccttttgctcacatgttctttcctgcgttatcccctgattctgtggataaccgtattaccgcctttgagtgagctgataccgctcgccgcagccgaacgaccgagcgcagcgagtcagtgagcgaggaagcggaagagcgcccaatacgcaaaccgcctctccccgcgcgttggccgattcattaatgcagctggcacgacaggtttcccgactggaaagcgggcagtgagcgcaacgcaattaatgtgagttagctcactcattaggcaccccaggctttacactttatgcttccggctcgtatgttgtgtggaattgtgagcggataacaatttcacacaggaaacagctatgaccatgattacgccaagcttacgcgtcctggcattatgcccagtacatgaccttatgggactttcctacttggcagtacatctacgtattagtcatcgctattaccatggtgatgcggttttggcagtacatcaatgggcgtggatagcggtttgactcacggggatttccaagtctccaccccattgacgtcaatgggagtttgttttggcaccaaaatcaacgggactttccaaaatgtcgtaacaactccgccccattgacgcaaatgggcggtaggcgtgtacggtgggaggtctatataagcagagctcgtttagtgaaccgtgg

SEQ ID NO: 23 - DNA, 35062 bp, Artificial Sequence
  Vector with soluble s4-1BBL ectodomain construct
catcatcaataatataccttattttggattgaagccaatatgataatgagggggtggagtttgtgacgtggcgcggggcgtgggaacggggcgggtgacgtagtagtgtggcggaagtgtgatgttgcaagtgtggcggaacacatgtaagcgacggatgtggcaaaagtgacgtttttggtgtgcgccggtgtacacaggaagtgacaattttcgcgcggttttaggcggatgttgtagtaaatttgggcgtaaccgagtaagatttggccattttcgcgggaaaactgaataagaggaagtgaaatctgaataattttgtgttactcatagcgcgtaatatttgtctagggccgcggggactttgaccgtttacgtggagactcgcccaggtgtttttctcaggtgttttccgcgttccgggtcaaagttggcgttttattattatagtcagtcgaagcttggatccggtacctctagaattctcgagcggccgctagcgacatcggatctcccgatcccctatggtcgactctcagtacaatctgctctgatgccgcatagttaagccagtatctgctccctgcttgtgtgttggaggtcgctgagtagtgcgcgagcaaaatttaagctacaacaaggcaaggcttgaccgacaattgcatgaagaatctgcttagggttaggcgttttgcgctgcttcgcgatgtacgggccagatatacgcgttgacattgattattgactagttattaatagtaatcaattacggggtcattagttcatagcccatatatggagttccgcgttacataacttacggtaaatggcccgcctggctgaccgcccaacgacccccgcccattgacgtcaataatgacgtatgttcccatagtaacgccaatagggactttccattgacgtcaatgggtggactatttacggtaaactgcccacttggcagtacatcaagtgtatcatatgccaagtacgccccctattgacgtcaatgacggtaaatggcccgcctggcattatgcccagtacatgaccttatgggactttcctacttggcagtacatctacgtattagtcatcgctattaccatggtgatgcggttttggcagtacatcaatgggcgtggatagcggtttgactcacggggatttccaagtctccaccccattgacgtcaatgggagtttgttttggcaccaaaatcaacgggactttccaaaatgtcgtaacaactccgccccattgacgcaaatgggcggtaggcgtgtacggtgggaggtctatataagcagagctctctggctaactagagaacccactgcttactggcttatcgaaattaatacgactcactatagggagacccaagctggctagttaagctatcaacaagtttgtacaaaaaagcaggctgccaccatgcccatggggtctctgcaaccgctggccaccttgtacctgctggggatgctggtcgcttcctgcctcggattggacctgcggcagggcatgtttgcgcagctggtggcccaaaatgttctgctgatcgatgggcccctgagctggtacagtgacccaggcctggcaggcgtgtccctgacggggggcctgagctacaaagaggacacgaaggagctggtggtggccaaggctggagtctactatgtcttctttcaactagagctgcggcgcgtggtggccggcgagggctcaggctccgtttcacttgcgctgcacctgcagccactgcgctctgctgctggggccgccgccctggctttgaccgtggacctgccacccgcctcctccgaggctcggaactcggccttcggtttccagggccgcttgctgcacctgagtgccggccagcgcctgggcgtccatcttcacactgaggccagggcacgccatgcctggcagcttacccagggcgccacagtcttgggactcttccgggtgacccccgaaatcccagccggactcccttcaccgaggtcggaataaacccagctttcttgtacaaagtggttgatctagagggcccgcggttcgaaggtaagcctatccctaaccctctcctcggtctcgattctacgcgtaccggttagtaatgagtttaaacgggggaggctaactgaaacacggaaggagacaataccggaaggaacccgcgctatgacggcaataaaaagacagaataaaacgcacgggtgttgggtcgtttgttcataaacgcggggttcggtcccagggctggcactctgtcgataccccaccgagaccccattggggccaatacgcccgcgtttcttccttttccccaccccaccccccaagttcgggtgaaggcccagggctcgcagccaacgtcggggcggcaggccctgccatagcagatccgattcgacagatcactgaaatgtgtgggcgtggcttaagggtgggaaagaatatataaggtgggggtcttatgtagttttgtatctgttttgcagcagccgccgccgccatgagcaccaactcgtttgatggaagcattgtgagctcatatttgacaacgcgcatgcccccatgggccggggtgcgtcagaatgtgatgggctccagcattgatggtcgccccgtcctgcccgcaaactctactaccttgacctacgagaccgtgtctggaacgccgttggagactgcagcctccgccgccgcttcagccgctgcagccaccgcccgcgggattgtgactgactttgctttcctgagcccgcttgcaagcagtgcagcttcccgttcatccgcccgcgatgacaagttgacggctcttttggcacaattggattctttgacccgggaacttaatgtcgtttctcagcagctgttggatctgcgccagcaggtttctgccctgaaggcttcctcccctcccaatgcggtttaaaacataaataaaaaaccagactctgtttggatttggatcaagcaagtgtcttgctgtctttatttaggggttttgcgcgcgcggtaggcccgggaccagcggtctcggtcgttgagggtcctgtgtattttttccaggacgtggtaaaggtgactctggatgttcagatacatgggcataagcccgtctctggggtggaggtagcaccactgcagagcttcatgctgcggggtggtgttgtagatgatccagtcgtagcaggagcgctgggcgtggtgcctaaaaatgtctttcagtagcaagctgattgccaggggcaggcccttggtgtaagtgtttacaaagcggttaagctgggatgggtgcatacgtggggatatgagatgcatcttggactgtatttttaggttggctatgttcccagccatatccctccggggattcatgttgtgcagaaccaccagcacagtgtatccggtgcacttgggaaatttgtcatgtagcttagaaggaaatgcgtggaagaacttggagacgcccttgtgacctccaagattttccatgcattcgtccataatgatggcaatgggcccacgggcggcggcctgggcgaagatatttctgggatcactaacgtcatagttgtgttccaggatgagatcgtcataggccatttttacaaagcgcgggcggagggtgccagactgcggtataatggttccatccggcccaggggcgtagttaccctcacagatttgcatttcccacgctttgagttcagatggggggatcatgtctacctgcggggcgatgaagaaaacggtttccggggtaggggagatcagctgggaagaaagcaggttcctgagcagctgcgacttaccgcagccggtgggcccgtaaatcacacctattaccgggtgcaactggtagttaagagagctgcagctgccgtcatccctgagcaggggggccacttcgttaagcatgtccctgactcgcatgttttccctgaccaaatccgccagaaggcgctcgccgcccagcgatagcagttcttgcaaggaagcaaagtttttcaacggtttgagaccgtccgccgtaggcatgcttttgagcgtttgaccaagcagttccaggcggtcccacagctcggtcacctgctctacggcatctcgatccagcatatctcctcgtttcgcgggttggggcggctttcgctgtacggcagtagtcggtgctcgtccagacgggccagggtcatgtctttccacgggcgcagggtcctcgtcagcgtagtctgggtcacggtgaaggggtgcgctccgggctgcgcgctggccagggtgcgcttgaggctggtcctgctggtgctgaagcgctgccggtcttcgccctgcgcgtcggccaggtagcatttgaccatggtgtcatagtccagcccctccgcggcgtggcccttggcgcgcagcttgcccttggaggaggcgccgcacgaggggcagtgcagacttttgagggcgtagagcttgggcgcgagaaataccgattccggggagtaggcatccgcgccgcaggccccgcagacggtctcgcattccacgagccaggtgagctctggccgttcggggtcaaaaaccaggtttcccccatgctttttgatgcgtttcttacctctggtttccatgagccggtgtccacgctcggtgacgaaaaggctgtccgtgtccccgtatacagacttgagaggcctgtcctcgagcggtgttccgcggtcctcctcgtatagaaactcggaccactctgagacaaaggctcgcgtccaggccagcacgaaggaggctaagtgggaggggtagcggtcgttgtccactagggggtccactcgctccagggtgtgaagacacatgtcgccctcttcggcatcaaggaaggtgattggtttgtaggtgtaggccacgtgaccgggtgttcctgaaggggggctataaaagggggtgggggcgcgttcgtcctcactctcttccgcatcgctgtctgcgagggccagctgttggggtgagtactccctctgaaaagcgggcatgacttctgcgctaagattgtcagtttccaaaaacgaggaggatttgatattcacctggcccgcggtgatgcctttgagggtggccgcatccatctggtcagaaaagacaatctttttgttgtcaagcttggtggcaaacgacccgtagagggcgttggacagcaacttggcgatggagcgcagggtttggtttttgtcgcgatcggcgcgctccttggccgcgatgtttagctgcacgtattcgcgcgcaacgcaccgccattcgggaaagacggtggtgcgctcgtcgggcaccaggtgcacgcgccaaccgcggttgtgcagggtgacaaggtcaacgctggtggctacctctccgcgtaggcgctcgttggtccagcagaggcggccgcccttgcgcgagcagaatggcggtagggggtctagctgcgtctcgtccggggggtctgcgtccacggtaaagaccccgggcagcaggcgcgcgtcgaagtagtctatcttgcatccttgcaagtctagcgcctgctgccatgcgcgggcggcaagcgcgcgctcgtatgggttgagtgggggaccccatggcatggggtgggtgagcgcggaggcgtacatgccgcaaatgtcgtaaacgtagaggggctctctgagtattccaagatatgtagggtagcatcttccaccgcggatgctggcgcgcacgtaatcgtatagttcgtgcgagggagcgaggaggtcgggaccgaggttgctacgggcgggctgctctgctcggaagactatctgcctgaagatggcatgtgagttggatgatatggttggacgctggaagacgttgaagctggcgtctgtgagacctaccgcgtcacgcacgaaggaggcgtaggagtcgcgcagcttgttgaccagctcggcggtgacctgcacgtctagggcgcagtagtccagggtttccttgatgatgtcatacttatcctgtcccttttttttccacagctcgcggttgaggacaaactcttcgcggtctttccagtactcttggatcggaaacccgtcggcctccgaacggtaagagcctagcatgtagaactggttgacggcctggtaggcgcagcatcccttttctacgggtagcgcgtatgcctgcgcggccttccggagcgaggtgtgggtgagcgcaaaggtgtccctgaccatgactttgaggtactggtatttgaagtcagtgtcgtcgcatccgccctgctcccagagcaaaaagtccgtgcgctttttggaacgcggatttggcagggcgaaggtgacatcgttgaagagtatctttcccgcgcgaggcataaagttgcgtgtgatgcggaagggtcccggcacctcggaacggttgttaattacctgggcggcgagcacgatctcgtcaaagccgttgatgttgtggcccacaatgtaaagttccaagaagcgcgggatgcccttgatggaaggcaattttttaagttcctcgtaggtgagctcttcaggggagctgagcccgtgctctgaaagggcccagtctgcaagatgagggttggaagcgacgaatgagctccacaggtcacgggccattagcatttgcaggtggtcgcgaaaggtcctaaactggcgacctatggccattttttctggggtgatgcagtagaaggtaagcgggtcttgttcccagcggtcccatccaaggttcgcggctaggtctcgcgcggcagtcactagaggctcatctccgccgaacttcatgaccagcatgaagggcacgagctgcttcccaaaggcccccatccaagtataggtctctacatcgtaggtgacaaagagacgctcggtgcgaggatgcgagccgatcgggaagaactggatctcccgccaccaattggaggagtggctattgatgtggtgaaagtagaagtccctgcgacgggccgaacactcgtgctggcttttgtaaaaacgtgcgcagtactggcagcggtgcacgggctgtacatcctgcacgaggttgacctgacgaccgcgcacaaggaagcagagtgggaatttgagcccctcgcctggcgggtttggctggtggtcttctacttcggctgcttgtccttgaccgtctggctgctcgaggggagttacggtggatcggaccaccacgccgcgcgagcccaaagtccagatgtccgcgcgcggcggtcggagcttgatgacaacatcgcgcagatgggagctgtccatggtctggagctcccgcggcgtcaggtcaggcgggagctcctgcaggtttacctcgcatagacgggtcagggcgcgggctagatccaggtgatacctaatttccaggggctggttggtggcggcgtcgatggcttgcaagaggccgcatccccgcggcgcgactacggtaccgcgcggcgggcggtgggccgcgggggtgtccttggatgatgcatctaaaagcggtgacgcgggcgagcccccggaggtagggggggctccggacccgccgggagagggggcaggggcacgtcggcgccgcgcgcgggcaggagctggtgctgcgcgcgtaggttgctggcgaacgcgacgacgcggcggttgatctcctgaatctggcgcctctgcgtgaagacgacgggcccggtgagcttgagcctgaaagagagttcgacagaatcaatttcggtgtcgttgacggcggcctggcgcaaaatctcctgcacgtctcctgagttgtcttgataggcgatctcggccatgaactgctcgatctcttcctcctggagatctccgcgtccggctcgctccacggtggcggcgaggtcgttggaaatgcgggccatgagctgcgagaaggcgttgaggcctccctcgttccagacgcggctgtagaccacgcccccttcggcatcgcgggcgcgcatgaccacctgcgcgagattgagctccacgtgccgggcgaagacggcgtagtttcgcaggcgctgaaagaggtagttgagggtggtggcggtgtgttctgccacgaagaagtacataacccagcgtcgcaacgtggattcgttgatatcccccaaggcctcaaggcgctccatggcctcgtagaagtccacggcgaagttgaaaaactgggagttgcgcgccgacacggttaactcctcctccagaagacggatgagctcggcgacagtgtcgcgcacctcgcgctcaaaggctacaggggcctcttcttcttcttcaatctcctcttccataagggcctccccttcttcttcttctggcggcggtgggggaggggggacacggcggcgacgacggcgcaccgggaggcggtcgacaaagcgctcgatcatctccccgcggcgacggcgcatggtctcggtgacggcgcggccgttctcgcgggggcgcagttggaagacgccgcccgtcatgtcccggttatgggttggcggggggctgccatgcggcagggatacggcgctaacgatgcatctcaacaattgttgtgtaggtactccgccgccgagggacctgagcgagtccgcatcgaccggatcggaaaacctctcgagaaaggcgtctaaccagtcacagtcgcaaggtaggctgagcaccgtggcgggcggcagcgggcggcggtcggggttgtttctggcggaggtgctgctgatgatgtaattaaagtaggcggtcttgagacggcggatggtcgacagaagcaccatgtccttgggtccggcctgctgaatgcgcaggcggtcggccatgccccaggcttcgttttgacatcggcgcaggtctttgtagtagtcttgcatgagcctttctaccggcacttcttcttctccttcctcttgtcctgcatctcttgcatctatcgctgcggcggcggcggagtttggccgtaggtggcgccctcttcctcccatgcgtgtgaccccgaagcccctcatcggctgaagcagggctaggtcggcgacaacgcgctcggctaatatggcctgctgcacctgcgtgagggtagactggaagtcatccatgtccacaaagcggtggtatgcgcccgtgttgatggtgtaagtgcagttggccataacggaccagttaacggtctggtgacccggctgcgagagctcggtgtacctgagacgcgagtaagccctcgagtcaaatacgtagtcgttgcaagtccgcaccaggtactggtatcccaccaaaaagtgcggcggcggctggcggtagaggggccagcgtagggtggccggggctccgggggcgagatcttccaacataaggcgatgatatccgtagatgtacctggacatccaggtgatgccggcggcggtggtggaggcgcgcggaaagtcgcggacgcggttccagatgttgcgcagcggcaaaaagtgctccatggtcgggacgctctggccggtcaggcgcgcgcaatcgttgacgctctagaccgtgcaaaaggagagcctgtaagcgggcactcttccgtggtctggtggataaattcgcaagggtatcatggcggacgaccggggttcgagccccgtatccggccgtccgccgtgatccatgcggttaccgcccgcgtgtcgaacccaggtgtgcgacgtcagacaacgggggagtgctccttttggcttccttccaggcgcggcggctgctgcgctagcttttttggccactggccgcgcgcagcgtaagcggttaggctggaaagcgaaagcattaagtggctcgctccctgtagccggagggttattttccaagggttgagtcgcgggacccccggttcgagtctcggaccggccggactgcggcgaacgggggtttgcctccccgtcatgcaagaccccgcttgcaaattcctccggaaacagggacgagccccttttttgcttttcccagatgcatccggtgctgcggcagatgcgcccccctcctcagcagcggcaagagcaagagcagcggcagacatgcagggcaccctcccctcctcctaccgcgtcaggaggggcgacatccgcggttgacgcggcagcagatggtgattacgaacccccgcggcgccgggcccggcactacctggacttggaggagggcgagggcctggcgcggctaggagcgccctctcctgagcggtacccaagggtgcagctgaagcgtgatacgcgtgaggcgtacgtgccgcggcagaacctgtttcgcgaccgcgagggagaggagcccgaggagatgcgggatcgaaagttccacgcagggcgcgagctgcggcatggcctgaatcgcgagcggttgctgcgcgaggaggactttgagcccgacgcgcgaaccgggattagtcccgcgcgcgcacacgtggcggccgccgacctggtaaccgcatacgagcagacggtgaaccaggagattaactttcaaaaaagctttaacaaccacgtgcgtacgcttgtggcgcgcgaggaggtggctataggactgatgcatctgtgggactttgtaagcgcgctggagcaaaacccaaatagcaagccgctcatggcgcagctgttccttatagtgcagcacagcagggacaacgaggcattcagggatgcgctgctaaacatagtagagcccgagggccgctggctgctcgatttgataaacatcctgcagagcatagtggtgcaggagcgcagcttgagcctggctgacaaggtggccgccatcaactattccatgcttagcctgggcaagttttacgcccgcaagatataccataccccttacgttcccatagacaaggaggtaaagatcgaggggttctacatgcgcatggcgctgaaggtgcttaccttgagcgacgacctgggcgtttatcgcaacgagcgcatccacaaggccgtgagcgtgagccggcggcgcgagctcagcgaccgcgagctgatgcacagcctgcaaagggccctggctggcacgggcagcggcgatagagaggccgagtcctactttgacgcgggcgctgacctgcgctgggccccaagccgacgcgccctggaggcagctggggccggacctgggctggcggtggcacccgcgcgcgctggcaacgtcggcggcgtggaggaatatgacgaggacgatgagtacgagccagaggacggcgagtactaagcggtgatgtttctgatcagatgatgcaagacgcaacggacccggcggtgcgggcggcgctgcagagccagccgtccggccttaactccacggacgactggcgccaggtcatggaccgcatcatgtcgctgactgcgcgcaatcctgacgcgttccggcagcagccgcaggccaaccggctctccgcaattctggaagcggtggtcccggcgcgcgcaaaccccacgcacgagaaggtgctggcgatcgtaaacgcgctggccgaaaacagggccatccggcccgacgaggccggcctggtctacgacgcgctgcttcagcgcgtggctcgttacaacagcggcaacgtgcagaccaacctggaccggctggtgggggatgtgcgcgaggccgtggcgcagcgtgagcgcgcgcagcagcagggcaacctgggctccatggttgcactaaacgccttcctgagtacacagcccgccaacgtgccgcggggacaggaggactacaccaactttgtgagcgcactgcggctaatggtgactgagacaccgcaaagtgaggtgtaccagtctgggccagactattttttccagaccagtagacaaggcctgcagaccgtaaacctgagccaggctttcaaaaacttgcaggggctgtggggggtgcgggctcccacaggcgaccgcgcgaccgtgtctagcttgctgacgcccaactcgcgcctgttgctgctgctaatagcgcccttcacggacagtggcagcgtgtcccgggacacatacctaggtcacttgctgacactgtaccgcgaggccataggtcaggcgcatgtggacgagcatactttccaggagattacaagtgtcagccgcgcgctggggcaggaggacacgggcagcctggaggcaaccctaaactacctgctgaccaaccggcggcagaagatcccctcgttgcacagtttaaacagcgaggaggagcgcattttgcgctacgtgcagcagagcgtgagccttaacctgatgcgcgacggggtaacgcccagcgtggcgctggacatgaccgcgcgcaacatggaaccgggcatgtatgcctcaaaccggccgtttatcaaccgcctaatggactacttgcatcgcgcggccgccgtgaaccccgagtatttcaccaatgccatcttgaacccgcactggctaccgccccctggtttctacaccgggggattcgaggtgcccgagggtaacgatggattcctctgggacgacatagacgacagcgtgttttccccgcaaccgcagaccctgctagagttgcaacagcgcgagcaggcagaggcggcgctgcgaaaggaaagcttccgcaggccaagcagcttgtccgatctaggcgctgcggccccgcggtcagatgctagtagcccatttccaagcttgatagggtctcttaccagcactcgcaccacccgcccgcgcctgctgggcgaggaggagtacctaaacaactcgctgctgcagccgcagcgcgaaaaaaacctgcctccggcatttcccaacaacgggatagagagcctagtggacaagatgagtagatggaagacgtacgcgcaggagcacagggacgtgccaggcccgcgcccgcccacccgtcgtcaaaggcacgaccgtcagcggggtctggtgtgggaggacgatgactcggcagacgacagcagcgtcctggatttgggagggagtggcaacccgtttgcgcaccttcgccccaggctggggagaatgttttaaaaaaaaaaaagcatgatgcaaaataaaaaactcaccaaggccatggcaccgagcgttggttttcttgtattccccttagtatgcggcgcgcggcgatgtatgaggaaggtcctcctccctcctacgagagtgtggtgagcgcggcgccagtggcggcggcgctgggttctcccttcgatgctcccctggacccgccgtttgtgcctccgcggtacctgcggcctaccggggggagaaacagcatccgttactctgagttggcacccctattcgacaccacccgtgtgtacctggtggacaacaagtcaacggatgtggcatccctgaactaccagaacgaccacagcaactttctgaccacggtcattcaaaacaatgactacagcccgggggaggcaagcacacagaccatcaatcttgacgaccggtcgcactggggcggcgacctgaaaaccatcctgcataccaacatgccaaatgtgaacgagttcatgtttaccaataagtttaaggcgcgggtgatggtgtcgcgcttgcctactaaggacaatcaggtggagctgaaatacgagtgggtggagttcacgctgcccgagggcaactactccgagaccatgaccatagaccttatgaacaacgcgatcgtggagcactacttgaaagtgggcagacagaacggggttctggaaagcgacatcggggtaaagtttgacacccgcaacttcagactggggtttgaccccgtcactggtcttgtcatgcctggggtatatacaaacgaagccttccatccagacatcattttgctgccaggatgcggggtggacttcacccacagccgcctgagcaacttgttgggcatccgcaagcggcaacccttccaggagggctttaggatcacctacgatgatctggagggtggtaacattcccgcactgttggatgtggacgcctaccaggcgagcttgaaagatgacaccgaacagggcgggggtggcgcaggcggcagcaacagcagtggcagcggcgcggaagagaactccaacgcggcagccgcggcaatgcagccggtggaggacatgaacgatcatgccattcgcggcgacacctttgccacacgggctgaggagaagcgcgctgaggccgaagcagcggccgaagctgccgcccccgctgcgcaacccgaggtcgagaagcctcagaagaaaccggtgatcaaacccctgacagaggacagcaagaaacgcagttacaacctaataagcaatgacagcaccttcacccagtaccgcagctggtaccttgcatacaactacggcgaccctcagaccggaatccgctcatggaccctgctttgcactcctgacgtaacctgcggctcggagcaggtctactggtcgttgccagacatgatgcaagaccccgtgaccttccgctccacgcgccagatcagcaactttccggtggtgggcgccgagctgttgcccgtgcactccaagagcttctacaacgaccaggccgtctactcccaactcatccgccagtttacctctctgacccacgtgttcaatcgctttcccgagaaccagattttggcgcgcccgccagcccccaccatcaccaccgtcagtgaaaacgttcctgctctcacagatcacgggacgctaccgctgcgcaacagcatcggaggagtccagcgagtgaccattactgacgccagacgccgcacctgcccctacgtttacaaggccctgggcatagtctcgccgcgcgtcctatcgagccgcactttttgagcaagcatgtccatccttatatcgcccagcaataacacaggctggggcctgcgcttcccaagcaagatgtttggcggggccaagaagcgctccgaccaacacccagtgcgcgtgcgcgggcactaccgcgcgccctggggcgcgcacaaacgcggccgcactgggcgcaccaccgtcgatgacgccatcgacgcggtggtggaggaggcgcgcaactacacgcccacgccgccaccagtgtccacagtggacgcggccattcagaccgtggtgcgcggagcccggcgctatgctaaaatgaagagacggcggaggcgcgtagcacgtcgccaccgccgccgacccggcactgccgcccaacgcgcggcggcggccctgcttaaccgcgcacgtcgcaccggccgacgggcggccatgcgggccgctcgaaggctggccgcgggtattgtcactgtgccccccaggtccaggcgacgagcggccgccgcagcagccgcggccattagtgctatgactcagggtcgcaggggcaacgtgtattgggtgcgcgactcggttagcggcctgcgcgtgcccgtgcgcacccgccccccgcgcaactagattgcaagaaaaaactacttagactcgtactgttgtatgtatccagcggcggcggcgcgcaacgaagctatgtccaagcgcaaaatcaaagaagagatgctccaggtcatcgcgccggagatctatggccccccgaagaaggaagagcaggattacaagccccgaaagctaaagcgggtcaaaaagaaaaagaaagatgatgatgatgaacttgacgacgaggtggaactgctgcacgctaccgcgcccaggcgacgggtacagtggaaaggtcgacgcgtaaaacgtgttttgcgacccggcaccaccgtagtctttacgcccggtgagcgctccacccgcacctacaagcgcgtgtatgatgaggtgtacggcgacgaggacctgcttgagcaggccaacgagcgcctcggggagtttgcctacggaaagcggcataaggacatgctggcgttgccgctggacgagggcaacccaacacctagcctaaagcccgtaacactgcagcaggtgctgcccgcgcttgcaccgtccgaagaaaagcgcggcctaaagcgcgagtctggtgacttggcacccaccgtgcagctgatggtacccaagcgccagcgactggaagatgtcttggaaaaaatgaccgtggaacctgggctggagcccgaggtccgcgtgcggccaatcaagcaggtggcgccgggactgggcgtgcagaccgtggacgttcagatacccactaccagtagcaccagtattgccaccgccacagagggcatggagacacaaacgtccccggttgcctcagcggtggcggatgccgcggtgcaggcggtcgctgcggccgcgtccaagacctctacggaggtgcaaacggacccgtggatgtttcgcgtttcagccccccggcgcccgcgcggttcgaggaagtacggcgccgccagcgcgctactgcccgaatatgccctacatccttccattgcgcctacccccggctatcgtggctacacctaccgccccagaagacgagcaactacccgacgccgaaccaccactggaacccgccgccgccgtcgccgtcgccagcccgtgctggccccgatttccgtgcgcagggtggctcgcgaaggaggcaggaccctggtgctgccaacagcgcgctaccaccccagcatcgtttaaaagccggtctttgtggttcttgcagatatggccctcacctgccgcctccgtttcccggtgccgggattccgaggaagaatgcaccgtaggaggggcatggccggccacggcctgacgggcggcatgcgtcgtgcgcaccaccggcggcggcgcgcgtcgcaccgtcgcatgcgcggcggtatcctgcccctccttattccactgatcgccgcggcgattggcgccgtgcccggaattgcatccgtggccttgcaggcgcagagacactgattaaaaacaagttgcatgtggaaaaatcaaaataaaaagtctggactctcacgctcgcttggtcctgtaactattttgtagaatggaagacatcaactttgcgtctctggccccgcgacacggctcgcgcccgttcatgggaaactggcaagatatcggcaccagcaatatgagcggtggcgccttcagctggggctcgctgtggagcggcattaaaaatttcggttccaccgttaagaactatggcagcaaggcctggaacagcagcacaggccagatgctgagggataagttgaaagagcaaaatttccaacaaaaggtggtagatggcctggcctctggcattagcggggtggtggacctggccaaccaggcagtgcaaaataagattaacagtaagcttgatccccgccctcccgtagaggagcctccaccggccgtggagacagtgtctccagaggggcgtggcgaaaagcgtccgcgccccgacagggaagaaactctggtgacgcaaatagacgagcctccctcgtacgaggaggcactaaagcaaggcctgcccaccacccgtcccatcgcgcccatggctaccggagtgctgggccagcacacacccgtaacgctggacctgcctccccccgccgacacccagcagaaacctgtgctgccaggcccgaccgccgttgttgtaacccgtcctagccgcgcgtccctgcgccgcgccgccagcggtccgcgatcgttgcggcccgtagccagtggcaactggcaaagcacactgaacagcatcgtgggtctgggggtgcaatccctgaagcgccgacgatgcttctgaatagctaacgtgtcgtatgtgtgtcatgtatgcgtccatgtcgccgccagaggagctgctgagccgccgcgcgcccgctttccaagatggctaccccttcgatgatgccgcagtggtcttacatgcacatctcgggccaggacgcctcggagtacctgagccccgggctggtgcagtttgcccgcgccaccgagacgtacttcagcctgaataacaagtttagaaaccccacggtggcgcctacgcacgacgtgaccacagaccggtcccagcgtttgacgctgcggttcatccctgtggaccgtgaggatactgcgtactcgtacaaggcgcggttcaccctagctgtgggtgataaccgtgtgctggacatggcttccacgtactttgacatccgcggcgtgctggacaggggccctacttttaagccctactctggcactgcctacaacgccctggctcccaagggtgccccaaatccttgcgaatgggatgaagctgctactgctcttgaaataaacctagaagaagaggacgatgacaacgaagacgaagtagacgagcaagctgagcagcaaaaaactcacgtatttgggcaggcgccttattctggtataaatattacaaaggagggtattcaaataggtgtcgaaggtcaaacacctaaatatgccgataaaacatttcaacctgaacctcaaataggagaatctcagtggtacgaaactgaaattaatcatgcagctgggagagtccttaaaaagactaccccaatgaaaccatgttacggttcatatgcaaaacccacaaatgaaaatggagggcaaggcattcttgtaaagcaacaaaatggaaagctagaaagtcaagtggaaatgcaatttttctcaactactgaggcgaccgcaggcaatggtgataacttgactcctaaagtggtattgtacagtgaagatgtagatatagaaaccccagacactcatatttcttacatgcccactattaaggaaggtaactcacgagaactaatgggccaacaatctatgcccaacaggcctaattacattgcttttagggacaattttattggtctaatgtattacaacagcacgggtaatatgggtgttctggcgggccaagcatcgcagttgaatgctgttgtagatttgcaagacagaaacacagagctttcataccagcttttgcttgattccattggtgatagaaccaggtacttttctatgtggaatcaggctgttgacagctatgatccagatgttagaattattgaaaatcatggaactgaagatgaacttccaaattactgctttccactgggaggtgtgattaatacagagactcttaccaaggtaaaacctaaaacaggtcaggaaaatggatgggaaaaagatgctacagaattttcagataaaaatgaaataagagttggaaataattttgccatggaaatcaatctaaatgccaacctgtggagaaatttcctgtactccaacatagcgctgtatttgcccgacaagctaaagtacagtccttccaacgtaaaaatttctgataacccaaacacctacgactacatgaacaagcgagtggtggctcccgggttagtggactgctacattaaccttggagcacgctggtcccttgactatatggacaacgtcaacccatttaaccaccaccgcaatgctggcctgcgctaccgctcaatgttgctgggcaatggtcgctatgtgcccttccacatccaggtgcctcagaagttctttgccattaaaaacctccttctcctgccgggctcatacacctacgagtggaacttcaggaaggatgttaacatggttctgcagagctccctaggaaatgacctaagggttgacggagccagcattaagtttgatagcatttgcctttacgccaccttcttccccatggcccacaacaccgcctccacgcttgaggccatgcttagaaacgacaccaacgaccagtcctttaacgactatctctccgccgccaacatgctctaccctatacccgccaacgctaccaacgtgcccatatccatcccctcccgcaactgggcggctttccgcggctgggccttcacgcgccttaagactaaggaaaccccatcactgggctcgggctacgacccttattacacctactctggctctataccctacctagatggaaccttttacctcaaccacacctttaagaaggtggccattacctttgactcttctgtcagctggcctggcaatgaccgcctgcttacccccaacgagtttgaaattaagcgctcagttgacggggagggttacaacgttgcccagtgtaacatgaccaaagactggttcctggtacaaatgctagctaactacaacattggctaccagggcttctatatcccagagagctacaaggaccgcatgtactccttctttagaaacttccagcccatgagccgtcaggtggtggatgatactaaatacaaggactaccaacaggtgggcatcctacaccaacacaacaactctggatttgttggctaccttgcccccaccatgcgcgaaggacaggcctaccctgctaacttcccctatccgcttataggcaagaccgcagttgacagcattacccagaaaaagtttctttgcgatcgcaccctttggcgcatcccattctccagtaactttatgtccatgggcgcactcacagacctgggccaaaaccttctctacgccaactccgcccacgcgctagacatgacttttgaggtggatcccatggacgagcccacccttctttatgttttgtttgaagtctttgacgtggtccgtgtgcaccggccgcaccgcggcgtcatcgaaaccgtgtacctgcgcacgcccttctcggccggcaacgccacaacataaagaagcaagcaacatcaacaacagctgccgccatgggctccagtgagcaggaactgaaagccattgtcaaagatcttggttgtgggccatattttttgggcacctatgacaagcgctttccaggctttgtttctccacacaagctcgcctgcgccatagtcaatacggccggtcgcgagactgggggcgtacactggatggcctttgcctggaacccgcactcaaaaacatgctacctctttgagccctttggcttttctgaccagcgactcaagcaggtttaccagtttgagtacgagtcactcctgcgccgtagcgccattgcttcttcccccgaccgctgtataacgctggaaaagtccacccaaagcgtacaggggcccaactcggccgcctgtggactattctgctgcatgtttctccacgcctttgccaactggccccaaactcccatggatcacaaccccaccatgaaccttattaccggggtacccaactccatgctcaacagtccccaggtacagcccaccctgcgtcgcaaccaggaacagctctacagcttcctggagcgccactcgccctacttccgcagccacagtgcgcagattaggagcgccacttctttttgtcacttgaaaaacatgtaaaaataatgtactagagacactttcaataaaggcaaatgcttttatttgtacactctcgggtgattatttacccccacccttgccgtctgcgccgtttaaaaatcaaaggggttctgccgcgcatcgctatgcgccactggcagggacacgttgcgatactggtgtttagtgctccacttaaactcaggcacaaccatccgcggcagctcggtgaagttttcactccacaggctgcgcaccatcaccaacgcgtttagcaggtcgggcgccgatatcttgaagtcgcagttggggcctccgccctgcgcgcgcgagttgcgatacacagggttgcagcactggaacactatcagcgccgggtggtgcacgctggccagcacgctcttgtcggagatcagatccgcgtccaggtcctccgcgttgctcagggcgaacggagtcaactttggtagctgccttcccaaaaagggcgcgtgcccaggctttgagttgcactcgcaccgtagtggcatcaaaaggtgaccgtgcccggtctgggcgttaggatacagcgcctgcataaaagccttgatctgcttaaaagccacctgagcctttgcgccttcagagaagaacatgccgcaagacttgccggaaaactgattggccggacaggccgcgtcgtgcacgcagcaccttgcgtcggtgttggagatctgcaccacatttcggccccaccggttcttcacgatcttggccttgctagactgctccttcagcgcgcgctgcccgttttcgctcgtcacatccatttcaatcacgtgctccttatttatcataatgcttccgtgtagacacttaagctcgccttcgatctcagcgcagcggtgcagccacaacgcgcagcccgtgggctcgtgatgcttgtaggtcacctctgcaaacgactgcaggtacgcctgcaggaatcgccccatcatcgtcacaaaggtcttgttgctggtgaaggtcagctgcaacccgcggtgctcctcgttcagccaggtcttgcatacggccgccagagcttccacttggtcaggcagtagtttgaagttcgcctttagatcgttatccacgtggtacttgtccatcagcgcgcgcgcagcctccatgcccttctcccacgcagacacgatcggcacactcagcgggttcatcaccgtaatttcactttccgcttcgctgggctcttcctcttcctcttgcgtccgcataccacgcgccactgggtcgtcttcattcagccgccgcactgtgcgcttacctcctttgccatgcttgattagcaccggtgggttgctgaaacccaccatttgtagcgccacatcttctctttcttcctcgctgtccacgattacctctggtgatggcgggcgctcgggcttgggagaagggcgcttctttttcttcttgggcgcaatggccaaatccgccgccgaggtcgatggccgcgggctgggtgtgcgcggcaccagcgcgtcttgtgatgagtcttcctcgtcctcggactcgatacgccgcctcatccgcttttttgggggcgcccggggaggcggcggcgacggggacggggacgacacgtcctccatggttgggggacgtcgcgccgcaccgcgtccgcgctcgggggtggtttcgcgctgctcctcttcccgactggccatttccttctcctataggcagaaaaagatcatggagtcagtcgagaagaaggacagcctaaccgccccctctgagttcgccaccaccgcctccaccgatgccgccaacgcgcctaccaccttccccgtcgaggcacccccgcttgaggaggaggaagtgattatcgagcaggacccaggttttgtaagcgaagacgacgaggaccgctcagtaccaacagaggataaaaagcaagaccaggacaacgcagaggcaaacgaggaacaagtcgggcggggggacgaaaggcatggcgactacctagatgtgggagacgacgtgctgttgaagcatctgcagcgccagtgcgccattatctgcgacgcgttgcaagagcgcagcgatgtgcccctcgccatagcggatgtcagccttgcctacgaacgccacctattctcaccgcgcgtaccccccaaacgccaagaaaacggcacatgcgagcccaacccgcgcctcaacttctaccccgtatttgccgtgccagaggtgcttgccacctatcacatctttttccaaaactgcaagatacccctatcctgccgtgccaaccgcagccgagcggacaagcagctggccttgcggcagggcgctgtcatacctgatatcgcctcgctcaacgaagtgccaaaaatctttgagggtcttggacgcgacgagaagcgcgcggcaaacgctctgcaacaggaaaacagcgaaaatgaaagtcactctggagtgttggtggaactcgagggtgacaacgcgcgcctagccgtactaaaacgcagcatcgaggtcacccactttgcctacccggcacttaacctaccccccaaggtcatgagcacagtcatgagtgagctgatcgtgcgccgtgcgcagcccctggagagggatgcaaatttgcaagaacaaacagaggagggcctacccgcagttggcgacgagcagctagcgcgctggcttcaaacgcgcgagcctgccgacttggaggagcgacgcaaactaatgatggccgcagtgctcgttaccgtggagcttgagtgcatgcagcggttctttgctgacccggagatgcagcgcaagctagaggaaacattgcactacacctttcgacagggctacgtacgccaggcctgcaagatctccaacgtggagctctgcaacctggtctcctaccttggaattttgcacgaaaaccgccttgggcaaaacgtgcttcattccacgctcaagggcgaggcgcgccgcgactacgtccgcgactgcgtttacttatttctatgctacacctggcagacggccatgggcgtttggcagcagtgcttggaggagtgcaacctcaaggagctgcagaaactgctaaagcaaaacttgaaggacctatggacggccttcaacgagcgctccgtggccgcgcacctggcggacatcattttccccgaacgcctgcttaaaaccctgcaacagggtctgccagacttcaccagtcaaagcatgttgcagaactttaggaactttatcctagagcgctcaggaatcttgcccgccacctgctgtgcacttcctagcgactttgtgcccattaagtaccgcgaatgccctccgccgctttggggccactgctaccttctgcagctagccaactaccttgcctaccactctgacataatggaagacgtgagcggtgacggtctactggagtgtcactgtcgctgcaacctatgcaccccgcaccgctccctggtttgcaattcgcagctgcttaacgaaagtcaaattatcggtacctttgagctgcagggtccctcgcctgacgaaaagtccgcggctccggggttgaaactcactccggggctgtggacgtcggcttaccttcgcaaatttgtacctgaggactaccacgcccacgagattaggttctacgaagaccaatcccgcccgccaaatgcggagcttaccgcctgcgtcattacccagggccacattcttggccaattgcaagccatcaacaaagcccgccaagagtttctgctacgaaagggacggggggtttacttggacccccagtccggcgaggagctcaacccaatccccccgccgccgcagccctatcagcagcagccgcgggcccttgcttcccaggatggcacccaaaaagaagctgcagctgccgccgccacccacggacgaggaggaatactgggacagtcaggcagaggaggttttggacgaggaggaggaggacatgatggaagactgggagagcctagacgaggaagcttccgaggtcgaagaggtgtcagacgaaacaccgtcaccctcggtcgcattcccctcgccggcgccccagaaatcggcaaccggttccagcatggctacaacctccgctcctcaggcgccgccggcactgcccgttcgccgacccaaccgtagatgggacaccactggaaccagggccggtaagtccaagcagccgccgccgttagcccaagagcaacaacagcgccaaggctaccgctcatggcgcgggcacaagaacgccatagttgcttgcttgcaagactgtgggggcaacatctccttcgcccgccgctttcttctctaccatcacggcgtggccttcccccgtaacatcctgcattactaccgtcatctctacagcccatactgcaccggcggcagcggcagcggcagcaacagcagcggccacacagaagcaaaggcgaccggatagcaagactctgacaaagcccaagaaatccacagcggcggcagcagcaggaggaggagcgctgcgtctggcgcccaacgaacccgtatcgacccgcgagcttagaaacaggatttttcccactctgtatgctatatttcaacagagcaggggccaagaacaagagctgaaaataaaaaacaggtctctgcgatccctcacccgcagctgcctgtatcacaaaagcgaagatcagcttcggcgcacgctggaagacgcggaggctctcttcagtaaatactgcgcgctgactcttaaggactagtttcgcgccctttctcaaatttaagcgcgaaaactacgtcatctccagcggccacacccggcgccagcacctgtcgtcagcgccattatgagcaaggaaattcccacgccctacatgtggagttaccagccacaaatgggacttgcggctggagctgcccaagactactcaacccgaataaactacatgagcgcgggaccccacatgatatcccgggtcaacggaatccgcgcccaccgaaaccgaattctcttggaacaggcggctattaccaccacacctcgtaataaccttaatccccgtagttggcccgctgccctggtgtaccaggaaagtcccgctcccaccactgtggtacttcccagagacgcccaggccgaagttcagatgactaactcaggggcgcagcttgcgggcggctttcgtcacagggtgcggtcgcccgggcagggtataactcacctgacaatcagagggcgaggtattcagctcaacgacgagtcggtgagctcctcgcttggtctccgtccggacgggacatttcagatcggcggcgccggccgtccttcattcacgcctcgtcaggcaatcctaactctgcagacctcgtcctctgagccgcgctctggaggcattggaactctgcaatttattgaggagtttgtgccatcggtctactttaaccccttctcgggacctcccggccactatccggatcaatttattcctaactttgacgcggtaaaggactcggcggacggctacgactgaatgttaagtggagaggcagagcaactgcgcctgaaacacctggtccactgtcgccgccacaagtgctttgcccgcgactccggtgagttttgctactttgaattgcccgaggatcatatcgagggcccggcgcacggcgtccggcttaccgcccagggagagcttgcccgtagcctgattcgggagtttacccagcgccccctgctagttgagcgggacaggggaccctgtgttctcactgtgatttgcaactgtcctaaccttggattacatcaagatctttgttgccatctctgtgctgagtataataaatacagaaattaaaatatactggggctcctatcgccatcctgtaaacgccaccgtcttcacccgcccaagcaaaccaaggcgaaccttacctggtacttttaacatctctccctctgtgatttacaacagtttcaacccagacggagtgagtctacgagagaacctctccgagctcagctactccatcagaaaaaacaccaccctccttacctgccgggaacgtacgagtgcgtcaccggccgctgcaccacacctaccgcctgaccgtaaaccagactttttccggacagacctcaataactctgtttaccagaacaggaggtgagcttagaaaacccttagggtattaggccaaaggcgcagctactgtggggtttatgaacaattcaagcaactctacgggctattctaattcaggtttctctagaaatggacggaattattacagagcagcgcctgctagaaagacgcagggcagcggccgagcaacagcgcatgaatcaagagctccaagacatggttaacttgcaccagtgcaaaaggggtatcttttgtctggtaaagcaggccaaagtcacctacgacagtaataccaccggacaccgccttagctacaagttgccaaccaagcgtcagaaattggtggtcatggtgggagaaaagcccattaccataactcagcactcggtagaaaccgaaggctgcattcactcaccttgtcaaggacctgaggatctctgcacccttattaagaccctgtgcggtctcaaagatcttattccctttaactaataaaaaaaaataataaagcatcacttacttaaaatcagttagcaaatttctgtccagtttattcagcagcacctccttgccctcctcccagctctggtattgcagcttcctcctggctgcaaactttctccacaatctaaatggaatgtcagtttcctcctgttcctgtccatccgcacccactatcttcatgttgttgcagatgaagcgcgcaagaccgtctgaagataccttcaaccccgtgtatccatatgacacggaaaccggtcctccaactgtgccttttcttactcctccctttgtatcccccaatgggtttcaagagagtccccctggggtactctctttgcgcctatccgaacctctagttacctccaatggcatgcttgcgctcaaaatgggcaacggcctctctctggacgaggccggcaaccttacctcccaaaatgtaaccactgtgagcccacctctcaaaaaaaccaagtcaaacataaacctggaaatatctgcacccctcacagttacctcagaagccctaactgtggctgccgccgcacctctaatggtcgcgggcaacacactcaccatgcaatcacaggccccgctaaccgtgcacgactccaaacttagcattgccacccaaggacccctcacagtgtcagaaggaaagctagccctgcaaacatcaggccccctcaccaccaccgatagcagtacccttactatcactgcctcaccccctctaactactgccactggtagcttgggcattgacttgaaagagcccatttatacacaaaatggaaaactaggactaaagtacggggctcctttgcatgtaacagacgacctaaacactttgaccgtagcaactggtccaggtgtgactattaataatacttccttgcaaactaaagttactggagccttgggttttgattcacaaggcaatatgcaacttaatgtagcaggaggactaaggattgattctcaaaacagacgccttatacttgatgttagttatccgtttgatgctcaaaaccaactaaatctaagactaggacagggccctctttttataaactcagcccacaacttggatattaactacaacaaaggcctttacttgtttacagcttcaaacaattccaaaaagcttgaggttaacctaagcactgccaaggggttgatgtttgacgctacagccatagccattaatgcaggagatgggcttgaatttggttcacctaatgcaccaaacacaaatcccctcaaaacaaaaattggccatggcctagaatttgattcaaacaaggctatggttcctaaactaggaactggccttagttttgacagcacaggtgccattacagtaggaaacaaaaataatgataagctaactttgtggaccacaccagctccatctcctaactgtagactaaatgcagagaaagatgctaaactcactttggtcttaacaaaatgtggcagtcaaatacttgctacagtttcagttttggctgttaaaggcagtttggctccaatatctggaacagttcaaagtgctcatcttattataagatttgacgaaaatggagtgctactaaacaattccttcctggacccagaatattggaactttagaaatggagatcttactgaaggcacagcctatacaaacgctgttggatttatgcctaacctatcagcttatccaaaatctcacggtaaaactgccaaaagtaacattgtcagtcaagtttacttaaacggagacaaaactaaacctgtaacactaaccattacactaaacggtacacaggaaacaggagacacaactccaagtgcatactctatgtcattttcatgggactggtctggccacaactacattaatgaaatatttgccacatcctcttacactttttcatacattgcccaagaataaagaatcgtttgtgttatgtttcaacgtgtttatttttcaattgcagaaaatttcgaatcatttttcattcagtagtatagccccaccaccacatagcttatacagatcaccgtaccttaatcaaactcacagaaccctagtattcaacctgccacctccctcccaacacacagagtacacagtcctttctccccggctggccttaaaaagcatcatatcatgggtaacagacatattcttaggtgttatattccacacggtttcctgtcgagccaaacgctcatcagtgatattaataaactccccgggcagctcacttaagttcatgtcgctgtccagctgctgagccacaggctgctgtccaacttgcggttgcttaacgggcggcgaaggagaagtccacgcctacatgggggtagagtcataatcgtgcatcaggatagggcggtggtgctgcagcagcgcgcgaataaactgctgccgccgccgctccgtcctgcaggaatacaacatggcagtggtctcctcagcgatgattcgcaccgcccgcagcataaggcgccttgtcctccgggcacagcagcgcaccctgatctcacttaaatcagcacagtaactgcagcacagcaccacaatattgttcaaaatcccacagtgcaaggcgctgtatccaaagctcatggcggggaccacagaacccacgtggccatcataccacaagcgcaggtagattaagtggcgacccctcataaacacgctggacataaacattacctcttttggcatgttgtaattcaccacctcccggtaccatataaacctctgattaaacatggcgccatccaccaccatcctaaaccagctggccaaaacctgcccgccggctatacactgcagggaaccgggactggaacaatgacagtggagagcccaggactcgtaaccatggatcatcatgctcgtcatgatatcaatgttggcacaacacaggcacacgtgcatacacttcctcaggattacaagctcctcccgcgttagaaccatatcccagggaacaacccattcctgaatcagcgtaaatcccacactgcagggaagacctcgcacgtaactcacgttgtgcattgtcaaagtgttacattcgggcagcagcggatgatcctccagtatggtagcgcgggtttctgtctcaaaaggaggtagacgatccctactgtacggagtgcgccgagacaaccgagatcgtgttggtcgtagtgtcatgccaaatggaacgccggacgtagtcatatttcctgaagcaaaaccaggtgcgggcgtgacaaacagatctgcgtctccggtctcgccgcttagatcgctctgtgtagtagttgtagtatatccactctctcaaagcatccaggcgccccctggcttcgggttctatgtaaactccttcatgcgccgctgccctgataacatccaccaccgcagaataagccacacccagccaacctacacattcgttctgcgagtcacacacgggaggagcgggaagagctggaagaaccatgtttttttttttattccaaaagattatccaaaacctcaaaatgaagatctattaagtgaacgcgctcccctccggtggcgtggtcaaactctacagccaaagaacagataatggcatttgtaagatgttgcacaatggcttccaaaaggcaaacggccctcacgtccaagtggacgtaaaggctaaacccttcagggtgaatctcctctataaacattccagcaccttcaaccatgcccaaataattctcatctcgccaccttctcaatatatctctaagcaaatcccgaatattaagtccggccattgtaaaaatctgctccagagcgccctccaccttcagcctcaagcagcgaatcatgattgcaaaaattcaggttcctcacagacctgtataagattcaaaagcggaacattaacaaaaataccgcgatcccgtaggtcccttcgcagggccagctgaacataatcgtgcaggtctgcacggaccagcgcggccacttccccgccaggaaccttgacaaaagaacccacactgattatgacacgcatactcggagctatgctaaccagcgtagccccgatgtaagctttgttgcatgggcggcgatataaaatgcaaggtgctgctcaaaaaatcaggcaaagcctcgcgcaaaaaagaaagcacatcgtagtcatgctcatgcagataaaggcaggtaagctccggaaccaccacagaaaaagacaccatttttctctcaaacatgtctgcgggtttctgcataaacacaaaataaaataacaaaaaaacatttaaacattagaagcctgtcttacaacaggaaaaacaacccttataagcataagacggactacggccatgccggcgtgaccgtaaaaaaactggtcaccgtgattaaaaagcaccaccgacagctcctcggtcatgtccggagtcataatgtaagactcggtaaacacatcaggttgattcacatcggtcagtgctaaaaagcgaccgaaatagcccgggggaatacatacccgcaggcgtagagacaacattacagcccccataggaggtataacaaaattaataggagagaaaaacacataaacacctgaaaaaccctcctgcctaggcaaaatagcaccctcccgctccagaacaacatacagcgcttccacagcggcagccataacagtcagccttaccagtaaaaaagaaaacctattaaaaaaacaccactcgacacggcaccagctcaatcagtcacagtgtaaaaaagggccaagtgcagagcgagtatatataggactaaaaaatgacgtaacggttaaagtccacaaaaaacacccagaaaaccgcacgcgaacctacgcccagaaacgaaagccaaaaaacccacaacttcctcaaatcgtcacttccgttttcccacgttacgtcacttcccattttaagaaaactacaattcccaacacatacaagttactccgccctaaaacctacgtcacccgccccgttcccacgccccgcgccacgtcacaaactccaccccctcattatcatattggcttcaatccaaaataaggtatattattgatgatgttaattaatttaaatccgcatgcgatatcgagctctcccgggaattcggatctgcgacgcgaggctggatggccttccccattatgattcttctcgcttccggcggcatcgggatgcccgcgttgcaggccatgctgtccaggcaggtagatgacgaccatcagggacagcttcacggccagcaaaaggccaggaaccgtaaaaaggccgcgttgctggcgtttttccataggctccgcccccctgacgagcatcacaaaaatcgacgctcaagtcagaggtggcgaaacccgacaggactataaagataccaggcgtttccccctggaagctccctcgtgcgctctcctgttccgaccctgccgcttaccggatacctgtccgcctttctcccttcgggaagcgtggcgctttctcaatgctcacgctgtaggtatctcagttcggtgtaggtcgttcgctccaagctgggctgtgtgcacgaaccccccgttcagcccgaccgctgcgccttatccggtaactatcgtcttgagtccaacccggtaagacacgacttatcgccactggcagcagccactggtaacaggattagcagagcgaggtatgtaggcggtgctacagagttcttgaagtggtggcctaactacggctacactagaaggacagtatttggtatctgcgctctgctgaagccagttaccttcggaaaaagagttggtagctcttgatccggcaaacaaaccaccgctggtagcggtggtttttttgtttgcaagcagcagattacgcgcagaaaaaaaggatctcaagaagatcctttgatcttttctacggggtctgacgctcagtggaacgaaaactcacgttaagggattttggtcatgagattatcaaaaaggatcttcacctagatccttttaaatcaatctaaagtatatatgagtaaacttggtctgacagttaccaatgcttaatcagtgaggcacctatctcagcgatctgtctatttcgttcatccatagttgcctgactccccgtcgtgtagataactacgatacgggagggcttaccatctggccccagtgctgcaatgataccgcgagacccacgctcaccggctccagatttatcagcaataaaccagccagccggaagggccgagcgcagaagtggtcctgcaactttatccgcctccatccagtctattaattgttgccgggaagctagagtaagtagttcgccagttaatagtttgcgcaacgttgttgccattgctgcaggcatcgtggtgtcacgctcgtcgtttggtatggcttcattcagctccggttcccaacgatcaaggcgagttacatgatcccccatgttgtgcaaaaaagcggttagctccttcggtcctccgatcgttgtcagaagtaagttggccgcagtgttatcactcatggttatggcagcactgcataattctcttactgtcatgccatccgtaagatgcttttctgtgactggtgagtactcaaccaagtcattctgagaatagtgtatgcggcgaccgagttgctcttgcccggcgtcaacacgggataataccgcgccacatagcagaactttaaaagtgctcatcattggaaaacgttcttcggggcgaaaactctcaaggatcttaccgctgttgagatccagttcgatgtaacccactcgtgcacccaactgatcttcagcatcttttactttcaccagcgtttctgggtgagcaaaaacaggaaggcaaaatgccgcaaaaaagggaataagggcgacacggaaatgttgaatactcatactcttcctttttcaatattattgaagcatttatcagggttattgtctcatgagcggatacatatttgaatgtatttagaaaaataaacaaataggggttccgcgcacatttccccgaaaagtgccacctgacgtctaagaaaccattattatcatgacattaacctataaaaataggcgtatcacgaggccctttcgtcttcaaggatccgaattcccgggagagctcgatatcgcatgcggatttaaattaattaa

SEQ ID NO: 24 - DNA, 20487 bp, Artificial Sequence
  Vector with soluble s4-1BBL ectodomain construct
accaaacaaagttgggtaaggatagttcaatcaatgatcatcttctagtgcacttaggattcaagatcctattatcagggacaagagcaggattagggatatctcgaggcgcgtgccaccatgcccatggggtctctgcaaccgctggccaccttgtacctgctggggatgctggtcgcttcctgcctcggaggctcacgaaacctcgttactgccttttcaaatatggatgacatgctgcaaaaggcgcacttggtcatcgaaggcacgtttatatacttgagagactctaccgagtttttcattcgggttcgagacggatggaaaaaattgcagcttggggaactgattccgatcccggcagacagtggatccttggacctgcggcagggcatgtttgcgcagctggtggcccaaaatgttctgctgatcgatgggcccctgagctggtacagtgacccaggcctggcaggcgtgtccctgacggggggcctgagctacaaagaggacacgaaggagctggtggtggccaaggctggagtctactatgtcttctttcaactagagctgcggcgcgtggtggccggcgagggctcaggctccgtttcacttgcgctgcacctgcagccactgcgctctgctgctggggccgccgccctggctttgaccgtggacctgccacccgcctcctccgaggctcggaactcggccttcggtttccagggccgcttgctgcacctgagtgccggccagcgcctgggcgtccatcttcacactgaggccagggcacgccatgcctggcagcttacccagggcgccacagtcttgggactcttccgggtgacccccgaaatcccagccggactcccttcaccgaggtcggaataaacgcgccatccatcattgttataaaaaacttaggattcaagatcctattatcagggacaagagcaggattagggatatccgagatggccacacttttaaggagcttagcattgttcaaaagaaacaaggacaaaccacccattacatcaggatccggtggagccatcagaggaatcaaacacattattatagtaccaatccctggagattcctcaattaccactcgatccagacttctggaccggttggtgaggttaattggaaacccggatgtgagcgggcccaaactaacaggggcactaataggtatattatccttatttgtggagtctccaggtcaattgattcagaggatcaccgatgaccctgacgttagcataaggctgttagaggttgtccagagtgaccagtcacaatctggccttaccttcgcatcaagaggtaccaacatggaggatgaggcggaccaatacttttcacatgatgatccaattagtagtgatcaatccaggttcggatggttcgggaacaaggaaatctcagatattgaagtgcaagaccctgagggattcaacatgattctgggtaccatcctagcccaaatttgggtcttgctcgcaaaggcggttacggccccagacacggcagctgattcggagctaagaaggtggataaagtacacccaacaaagaagggtagttggtgaatttagattggagagaaaatggttggatgtggtgaggaacaggattgccgaggacctctccttacgccgattcatggtcgctctaatcctggatatcaagagaacacccggaaacaaacccaggattgctgaaatgatatgtgacattgatacatatatcgtagaggcaggattagccagttttatcctgactattaagtttgggatagaaactatgtatcctgctcttggactgcatgaatttgctggtgagttatccacacttgagtccttgatgaacctttaccagcaaatgggggaaactgcaccctacatggtaatcctggagaactcaattcagaacaagttcagtgcaggatcataccctctgctctggagctatgccatgggagtaggagtggaacttgaaaactccatgggaggtttgaactttggccgatcttactttgatccagcatattttagattagggcaagagatggtaaggaggtcagctggaaaggtcagttccacattggcatctgaactcggtatcactgccgaggatgcaaggcttgtttcagagattgcaatgcatactactgaggacaagatcagtagagcggttggacccagacaagcccaagtatcatttctacacggtgatcaaagtgagaatgagctaccgagattggggggcaaggaagataggagggtcaaacagagtcgaggagaagccagggagagctacagagaaaccgggcccagcagagcaagtgatgcgagagctgcccatcttccaaccggcacacccctagacattgacactgcaacggagtccagccaagatccgcaggacagtcgaaggtcagctgacgccctgcttaggctgcaagccatggcaggaatctcggaagaacaaggctcagacacggacacccctatagtgtacaatgacagaaatcttctagactaggtgcgagaggccgagggccagaacaacatccgcctaccatccatcattgttataaaaaacttaggaaccaggtccacacagccgccagcccatcaaccatccactcccacgattggagccaatggcagaagagcaggcacgccatgtcaaaaacggactggaatgcatccgggctctcaaggccgagcccatcggctcactggccatcgaggaagctatggcagcatggtcagaaatatcagacaacccaggacaggagcgagccacctgcagggaagagaaggcaggcagttcgggtctcagcaaaccatgcctctcagcaattggatcaactgaaggcggtgcacctcgcatccgcggtcagggacctggagagagcgatgacgacgctgaaactttgggaatccccccaagaaatctccaggcatcaagcactgggttacagtgttattacgtttatgatcacagcggtgaagcggttaagggaatccaagatgctgactctatcatggttcaatcaggccttgatggtgatagcaccctctcaggaggagacaatgaatctgaaaacagcgatgtggatattggcgaacctgataccgagggatatgctatcactgaccggggatctgctcccatctctatggggttcagggcttctgatgttgaaactgcagaaggaggggagatccacgagctcctgagactccaatccagaggcaacaactttccgaagcttgggaaaactctcaatgttcctccgcccccggaccccggtagggccagcacttccgggacacccattaaaaagggcacagacgcgagattagcctcatttggaacggagatcgcgtctttattgacaggtggtgcaacccaatgtgctcgaaagtcaccctcggaaccatcagggccaggtgcacctgcggggaatgtccccgagtgtgtgagcaatgccgcactgatacaggagtggacacccgaatctggtaccacaatctccccgagatcccagaataatgaagaagggggagactattatgatgatgagctgttctctgatgtccaagatattaaaacagccttggccaaaatacacgaggataatcagaagataatctccaagctagaatcactgctgttattgaagggagaagttgagtcaattaagaagcagatcaacaggcaaaatatcagcatatccaccctggaaggacacctctcaagcatcatgatcgccattcctggacttgggaaggatcccaacgaccccactgcagatgtcgaaatcaatcccgacttgaaacccatcataggcagagattcaggccgagcactggccgaagttctcaagaaacccgttgccagccgacaactccaaggaatgacaaatggacggaccagttccagaggacagctgctgaaggaatttcagctaaagccgatcgggaaaaagatgagctcagccgtcgggtttgttcctgacaccggccctgcatcacgcagtgtaatccgctccattataaaatccagccggctagaggaggatcggaagcgttacctgatgactctccttgatgatatcaaaggagccaatgatcttgccaagttccaccagatgctgatgaagataataatgaagtagctacagctcaacttacctgccaaccccatgccagtcgacccaactagtacaacctaaatccattataaaaaacttaggagcaaagtgattgcctcccaaggtccacaatgacagagacctacgacttcgacaagtcggcatgggacatcaaagggtcgatcgctccgatacaacccaccacctacagtgatggcaggctggtgccccaggtcagagtcatagatcctggtctaggcgacaggaaggatgaatgctttatgtacatgtttctgctgggggttgttgaggacagcgattccctagggcctccaatcgggcgagcatttgggttcctgcccttaggtgttggcagatccacagcaaagcccgaaaaactcctcaaagaggccactgagcttgacatagttgttagacgtacagcagggctcaatgaaaaactggtgttctacaacaacaccccactaactctcctcacaccttggagaaaggtcctaacaacagggagtgtcttcaacgcaaaccaagtgtgcaatgcggttaatctgataccgctcgataccccgcagaggttccgtgttgtttatatgagcatcacccgtctttcggataacgggtattacaccgttcctagaagaatgctggaattcagatcggtcaatgcagtggccttcaacctgctggtgacccttaggattgacaaggcgataggccctgggaagatcatcgacaatacagagcaacttcctgaggcaacatttatggtccacatcgggaacttcaggagaaagaagagtgaagtctactctgccgattattgcaaaatgaaaatcgaaaagatgggcctggtttttgcacttggtgggatagggggcaccagtcttcacattagaagcacaggcaaaatgagcaagactctccatgcacaactcgggttcaagaagaccttatgttacccgctgatggatatcaatgaagaccttaatcgattactctggaggagcagatgcaagatagtaagaatccaggcagttttgcagccatcagttcctcaagaattccgcatttacgacgacgtgatcataaatgatgaccaaggactattcaaagttctgtagaccgtagtgcccagcaatgcccgaaaacgacccccctcacaatgacagccagaaggcccggacaaaaaagccccctccgaaagactccacggaccaagcgagaggccagccagcagccgacggcaagcgcgaacaccaggcggccccagcacagaacagccctgacacaaggccaccaccagccaccccaatctgcatcctcctcgtgggacccccgaggaccaacccccaaggctgcccccgatccaaaccaccaaccgcatccccaccacccccgggaaagaaacccccagcaattggaaggcccctccccctcttcctcaacacaagaactccacaaccgaaccgcacaagcgaccgaggtgacccaaccgcaggcatccgactccctagacagatcctctctccccggcaaactaaacaaaacttagggccaaggaacatacacacccaacagaacccagaccccggcccacggcgccgcgcccccaacccccgacaaccagagggagcccccaaccaatcccgccggctcccccggtgcccacaggcagggacaccaacccccgaacagacccagcacccaaccatcgacaatccaagacgggggggcccccccaaaaaaaggcccccaggggccgacagccagcaccgcgaggaagcccacccaccccacacacgaccacggcaaccaaaccagaacccagaccaccctgggccaccagctcccagactcggccatcaccccgcagaaaggaaaggccacaacccgcgcaccccagccccgatccggcggggagccacccaacccgaaccagcacccaagagcgatccccgaaggacccccgaaccgcaaaggacatcagtatcccacagcctctccaagtcccccggtctcctcctcttctcgaagggaccaaaagatcaatccaccacacccgacgacactcaactccccacccctaaaggagacaccgggaatcccagaatcaagactcatccaatgtccatcatgggtctcaaggtgaacgtctctgccatattcatggcagtactgttaactctccaaacacccaccggtcaaatccattggggcaatctctctaagataggggtggtaggaataggaagtgcaagctacaaagttatgactcgttccagccatcaatcattagtcataaaattaatgcccaatataactctcctcaataactgcacgagggtagagattgcagaatacaggagactactgagaacagttttggaaccaattagagatgcacttaatgcaatgacccagaatataagaccggttcagagtgtagcttcaagtaggagacacaagagatttgcgggagtagtcctggcaggtgcggccctaggcgttgccacagctgctcagataacagccggcattgcacttcaccagtccatgctgaactctcaagccatcgacaatctgagagcgagcctggaaactactaatcaggcaattgagacaatcagacaagcagggcaggagatgatattggctgttcagggtgtccaagactacatcaataatgagctgataccgtctatgaaccaactatcttgtgatttaatcggccagaagctcgggctcaaattgctcagatactatacagaaatcctgtcattatttggccccagtttacgggaccccatatctgcggagatatctatccaggctttgagctatgcgcttggaggagacatcaataaggtgttagaaaagctcggatacagtggaggtgatttactgggcatcttagagagcggaggcatcaaggcccggataactcacgtcgacacagagtcctacttcattgtcctcagtatagcctatccgacgctgtccgagattaagggggtgattgtccaccggctagagggggtctcgtacaacataggctctcaagagtggtataccactgtgcccaagtatgttgcaacccaagggtaccttatctcgaattttgatgagtcatcgtgtactttcatgccagaggggactgtgtgcagccaaaatgccttgtacccgatgagtcctctgctccaagaatgcctccgggggtacaccaagtcctgtgctcgtacactcgtatccgggtcttttgggaaccggttcattttatcacaagggaacctaatagccaattgtgcatcaatcctttgcaagtgttacacaacaggaacgatcattaatcaagaccctgacaagatcctaacatacattgctgccgatcactgcccggtagtcgaggtgaacggcgtgaccatccaagtcgggagcaggaggtatccagacgctgtgtacttgcacagaattgacctcggtcctcccatatcattggagaggttggacgtagggacaaatctggggaatgcaattgctaagttggaggatgccaaggaattgttggagtcatcggaccagatattgaggagtatgaaaggtttatcgagcactagcatagtctacatcctgattgcagtgtgtcttggagggttgatagggatccccgctttaatatgttgctgcagggggcgttgtaacaaaaagggagaacaagttggtatgtcaagaccaggcctaaagcctgatcttacgggaacatcaaaatcctatgtaaggtcgctctgatcctctacaactcttgaaacacaaatgtcccacaagtctcctcttcgtcatcaagcaaccaccgcacccagcatcaagcccacctgaaattatctccggcttccctctggccgaacaatatcggtagttaatcaaaacttagggtgcaagatcatccacaatgtcaccacaacgagaccggataaatgccttctacaaagataacccccatcccaagggaagtaggatagtcattaacagagaacatcttatgattgatagaccttatgttttgctggctgttctgtttgtcatgtttctgagcttgatcgggttgctagccattgcaggcattagacttcatcgggcagccatctacaccgcagagatccataaaagcctcagcaccaatctagatgtaactaactcaatcgagcatcaggtcaaggacgtgctgacaccactcttcaaaatcatcggtgatgaagtgggcctgaggacacctcagagattcactgacctagtgaaattaatctctgacaagatcaagttccttaatccggatagggagtacgacttcagagatctcacttggtgtatcaacccgccagagagaatcaaattggattatgatcaatactgtgcagatgtggctgctgaagagctcatgaatgcattggtgaactcaactctactggagaccagaacaaccaatcagttcctagctgtctcaaagggaaactgctcagggcccactacaatcagaggtcaattctcaaacatgtcgctgtccctgttagacttgtatttaggtcgaggttacaatgtgtcatctatagtcactatgacatcccagggaatgtatgggggaacttacctagtggaaaagcctaatctgagcagcaaaaggtcagagttgtcacaactgagcatgtaccgagtgtttgaagtaggtgttatcagaaatccgggtttgggggctccggtgttccatatgacaaactatcttgagcaaccagtcagtaatgatctcagcaactgtatggtggctttgggggagctcaaactcgcagccctttgtcacggggaagattctatcacaattccctatcagggatcagggaaaggtgtcagcttccagctcgtcaagctaggtgtctggaaatccccaaccgacatgcaatcctgggtccccttatcaacggatgatccagtgatagacaggctttacctctcatctcacagaggtgttatcgctgacaatcaagcaaaatgggctgtcccgacaacacgaacagatgacaagttgcgaatggagacatgcttccaacaggcgtgtaagggtaaaatccaagcactctgcgagaatcccgagtgggcaccattgaaggataacaggattccttcatacggggtcttgtctgttgatctgagtctgacagttgagcttaaaatcaaaattgcttcgggattcgggccattgatcacacacggttcagggatggacctatacaaatccaaccacaacaatgtgtattggctgactatcccgccaatgaagaacctagccttaggtgtaatcaacacattggagtggataccgagattcaaggttagtccctacctcttcactgtcccaattaaggaagcaggcgaagactgccatgccccaacatacctacctgcggaggtggatggtgatgtcaaactcagttccaatctggtgattctacctggtcaagatctccaatatgttttggcaacctacgatacttccagggttgaacatgctgtggtttattacgtttacagcccaagccgctcattttcttacttttatccttttaggttgcctataaagggggtccccatcgaattacaagtggaatgcttcacatgggaccaaaaactctggtgccgtcacttctgtgtgcttgcggactcagaatctggtggacatatcactcactctgggatggtgggcatgggagtcagctgcacagtcacccgggaagatggaaccaatcgcagatagggctgctagtgaaccaatcacatgatgtcacccagacatcaggcatacccactagtgtgaaatagacatcagaattaagaaaaacgtagggtccaagtggttccccgttatggactcgctatctgtcaaccagatcttataccctgaagttcacctagatagcccgatagttaccaataagatagtagccatcctggagtatgctcgagtccctcacgcttacagcctggaggaccctacactgtgtcagaacatcaagcaccgcctaaaaaacggattttccaaccaaatgattataaacaatgtggaagttgggaatgtcatcaagtccaagcttaggagttatccggcccactctcatattccatatccaaattgtaatcaggatttatttaacatagaagacaaagagtcaacgaggaagatccgtgaactcctcaaaaaggggaattcgctgtactccaaagtcagtgataaggttttccaatgcttaagggacactaactcacggcttggcctaggctccgaattgagggaggacatcaaggagaaagttattaacttgggagtttacatgcacagctcccagtggtttgagccctttctgttttggtttacagtcaagactgagatgaggtcagtgattaaatcacaaacccatacttgccataggaggagacacacacctgtattcttcactggtagttcagttgagttgctaatctctcgtgaccttgttgctataatcagtaaagagtctcaacatgtatattacctgacatttgaactggttttgatgtattgtgatgtcatagaggggaggttaatgacagagaccgctatgactattgatgctaggtatacagagcttctaggaagagtcagatacatgtggaaactgatagatggtttcttccctgcactcgggaatccaacttatcaaattgtagccatgctggagcctctttcacttgcttacctgcagctgagggatataacagtagaactcagaggtgctttccttaaccactgctttactgaaatacatgatgttcttgaccaaaacgggttttctgatgaaggtacttatcatgagttaactgaagctctagattacattttcataactgatgacatacatctgacaggggagattttctcatttttcagaagtttcggccaccccagacttgaagcagtaacggctgctgaaaatgttaggaaatacatgaatcagcctaaagtcattgtgtatgagactctgatgaaaggtcatgccatattttgtggaatcataatcaacggctatcgtgacaggcacggaggcagttggccaccgctgaccctccccctgcatgctgcagacacaatccggaatgctcaagcttcaggtgaagggttaacacatgagcagtgcgttgataactggaaatcttttgctggagtgaaatttggctgctttatgcctcttagcctggatagtgatctgacaatgtacctaaaggacaaggcacttgctgctctccaaagggaatgggattcagtttacccgaaagagttcctgcgttacgaccctcccaagggaaccgggtcacggaggcttgtagatgttttccttaatgattcgagctttgacccatatgatgtgataatgtatgttgtaagtggagcttacctccatgaccctgagttcaacctgtcttacagcctgaaagaaaaggagatcaaggaaacaggtagactttttgctaaaatgacttacaaaatgagggcatgccaagtgattgctgaaaatctaatctcaaacgggattggcaaatattttaaggacaatgggatggccaaggatgagcacgatttgactaaggcactccacactctagctgtctcaggagtccccaaagatctcaaagaaagtcacaggggggggccagtcttaaaaacctactcccgaagcccagtccacacaagtaccaggaacgtgagagcagcaaaagggtttatagggttccctcaagtaattcggcaggaccaagacactgatcatccggagaatatggaagcttacgagacagtcagtgcatttatcacgactgatctcaagaagtactgccttaattggagatatgagaccatcagcttgtttgcacagaggctaaatgagatttacggattgccctcatttttccagtggctgcataagaggcttgagacctctgtcctgtatgtaagtgaccctcattgcccccccgaccttgacgcccatatcccgttatataaagtccccaatgatcaaatcttcattaagtaccctatgggaggtatagaagggtattgtcagaagctgtggaccatcagcaccattccctatctatacctggctgcttatgagagcggagtaaggattgcttcgttagtgcaaggggacaatcagaccatagccgtaacaaaaagggtacccagcacatggccctacaaccttaagaaacgggaagctgctagagtaactagagattactttgtaattcttaggcaaaggctacatgatattggccatcacctcaaggcaaatgagacaattgtttcatcacatttttttgtctattcaaaaggaatatattatgatgggctacttgtgtcccaatcactcaagagcatcgcaagatgtgtattctggtcagagactatagttgatgaaacaagggcagcatgcagtaatattgctacaacaatggctaaaagcatcgagagaggttatgaccgttaccttgcatattccctgaacgtcctaaaagtgatacagcaaattctgatctctcttggcttcacaatcaattcaaccatgacccgggatgtagtcatacccctcctcacaaacaacgacctcttaataaggatggcactgttgcccgctcctattggggggatgaattatctgaatatgagcaggctgtttgtcagaaacatcggtgatccagtaacatcatcaattgctgatctcaagagaatgattctcgcctcactaatgcctgaagagaccctccatcaagtaatgacacaacaaccgggggactcttcattcctagactgggctagcgacccttactcagcaaatcttgtatgtgtccagagcatcactagactcctcaagaacataactgcaaggtttgtcctgatccatagtccaaacccaatgttaaaaggattattccatgatgacagtaaagaagaggacgagggactggcggcattcctcatggacaggcatattatagtacctagggcagctcatgaaatcctggatcatagtgtcacaggggcaagagagtctattgcaggcatgctggataccacaaaaggcttgattcgagccagcatgaggaagggggggttaacctctcgagtgataaccagattgtccaattatgactatgaacaattcagagcagggatggtgctattgacaggaagaaagagaaatgtcctcattgacaaagagtcatgttcagtgcagctggcgagagctctaagaagccatatgtgggcgaggctagctcgaggacggcctatttacggccttgaggtccctgatgtactagaatctatgcgaggccaccttattcggcgtcatgagacatgtgtcatctgcgagtgtggatcagtcaactacggatggttttttgtcccctcgggttgccaactggatgatattgacaaggaaacatcatccttgagagtcccatatattggttctaccactgatgagagaacagacatgaagcttgccttcgtaagagccccaagtcgatccttgcgatctgctgttagaatagcaacagtgtactcatgggcttacggtgatgatgatagctcttggaacgaagcctggttgttggctaggcaaagggccaatgtgagcctggaggagctaagggtgatcactcccatctcaacttcgactaatttagcgcataggttgagggatcgtagcactcaagtgaaatactcaggtacatcccttgtccgagtggcgaggtataccacaatctccaacgacaatctctcatttgtcatatcagataagaaggttgatactaactttatataccaacaaggaatgcttctagggttgggtgttttagaaacattgtttcgactcgagaaagataccggatcatctaacacggtattacatcttcacgtcgaaacagattgttgcgtgatcccgatgatagatcatcccaggatacccagctcccgcaagctagagctgagggcagagctatgtaccaacccattgatatatgataatgcacctttaattgacagagatgcaacaaggctatacacccagagccataggaggcaccttgtggaatttgttacatggtccacaccccaactatatcacattttagctaagtccacagcactatctatgattgacctggtaacaaaatttgagaaggaccatatgaatgaaatttcagctctcataggggatgacgatatcaatagtttcataactgagtttctgctcatagagccaagattattcactatctacttgggccagtgtgcggccatcaattgggcatttgatgtacattatcatagaccatcagggaaatatcagatgggtgagctgttgtcatcgttcctttctagaatgagcaaaggagtgtttaaggtgcttgtcaatgctctaagccacccaaagatctacaagaaattctggcattgtggtattatagagcctatccatggtccttcacttgatgctcaaaacttgcacacaactgtgtgcaacatggtttacacatgctatatgacctacctcgacctgttgttgaatgaagagttagaagagttcacatttctcttgtgtgaaagcgacgaggatgtagtaccggacagattcgacaacatccaggcaaaacacttatgtgttctggcagatttgtactgtcaaccagggacctgcccaccaattcgaggtctaagaccggtagagaaatgtgcagttctaaccgaccatatcaaggcagaggctatgttatctccagcaggatcttcgtggaacataaatccaattattgtagaccattactcatgctctctgacttatctccggcgaggatcgatcaaacagataagattgagagttgatccaggattcattttcgacgccctcgctgaggtaaatgtcagtcagccaaagatcggcagcaacaacatctcaaatatgagcatcaaggctttcagacccccacacgatgatgttgcaaaattgctcaaagatatcaacacaagcaagcacaatcttcccatttcagggggcaatctcgccaattatgaaatccatgctttccgcagaatcgggttgaactcatctgcttgctacaaagctgttgagatatcaacattaattaggagatgccttgagccaggggaggacggcttgttcttgggtgagggatcgggttctatgttgatcacttataaagagatacttaaactaaacaagtgcttctataatagtggggtttccgccaattctagatctggtcaaagggaattagcaccctatccctccgaagttggccttgtcgaacacagaatgggagtaggtaatattgtcaaagtgctctttaacgggaggcccgaagtcacgtgggtaggcagtgtagattgcttcaatttcatagttagtaatatccctacctctagtgtggggtttatccattcagatatagagaccttgcctgacaaagatactatagagaagctagaggaattggcagccatcttatcgatggctctgctcctgggcaaaataggatcaatactggtgattaagcttatgcctttcagcggggattttgttcagggatttataagttatgtagggtctcattatagagaagtgaaccttgtataccctagatacagcaacttcatctctactgaatcttatttggttatgacagatctcaaggctaaccggctaatgaatcctgaaaagattaagcagcagataattgaatcatctgtgaggacttcacctggacttataggtcacatcctatccattaagcaactaagctgcatacaagcaattgtgggagacgcagttagtagaggtgatatcaatcctactctgaaaaaacttacacctatagagcaggtgctgatcaattgcgggttggcaattaacggacctaagctgtgcaaagaattgatccaccatgatgttgcctcagggcaagatggattgcttaattctatactcatcctctacagggagttggcaagattcaaagacaaccaaagaagtcaacaagggatgttccacgcttaccccgtattggtaagtagcaggcaacgagaacttatatctaggatcacccgcaaattctgggggcacattcttctttactccgggaacaaaaagttgataaataagtttatccagaatctcaagtccggctatctgatactagacttacaccagaatatcttcgttaagaatctatccaagtcagagaaacagattattatgacggggggtttgaaacgtgagtgggtttttaaggtaacagtcaaggagaccaaagaatggtataagttagtcggatacagtgccctgattaaggactaattggttgaactccggaaccctaatcctgccctaggtggttaggcattatttgcaatatattaaagaaaactttgaaaatacgaagtttctattcccagctttgtctggtggccggcatggtcccagcctcctcgctggcgccggctgggcaacattccgaggggaccgtcccctcggtaatggcgaatgggacgcggccggtcgatcgacgatccggctgctaacaaagcccgaaaggaagctgagttggctgctgccaccgctgagcaataactagcataaccccttggggcctctaaacgggtcttgaggggttttttgctgaaaggaggaactatatccggatcgagatcaattctgtgagcgtatggcaaacgaaggaaaaatagttatagtagccgcactcgatgggacatttcaacgtaaaccgtttaataatattttgaatcttattccattatctgaaatggtggtaaaactaactgctgtgtgtatgaaatgctttaaggaggcttccttttctaaacgattgggtgaggaaaccgagatagaaataataggaggtaatgatatgtatcaatcggtgtgtagaaagtgttacatcgactcataatattatattttttatctaaaaaactaaaaataaacattgattaaattttaatataatacttaaaaatggatgttgtgtcgttagataaaccgtttatgtattttgaggaaattgataatgagttagattacgaaccagaaagtgcaaatgaggtcgcaaaaaaactgccgtatcaaggacagttaaaactattactaggagaattattttttcttagtaagttacagcgacacggtatattagatggtgccaccgtagtgtatataggatctgctcccggtacacatatacgttatttgagagatcatttctataatttaggagtgatcccgaaaggaagctgagttggctgctgccaccgctgagcaataactagcataaccccttggggcctctaaacgggtcttgaggggttttttgctgaaaggaggaacgcgcctgatgcggtattttctccttacgcatctgtgcggtatttcacaccgcatatatggtgcactctcagtacaatctgctctgatgccgcatagttaagccagccccgacacccgccaacacccgctgacgcgccctgacgggcttgtctgctcccggcatccgcttacagacaagctgtgaccgtctccgggagctgcatgtgtcagaggttttcaccgtcatcaccgaaacgcgcgagacgaaagggcctcgtgatacgcctatttttataggttaatgtcatgataataatggtttcttagacgtcaggtggcacttttcggggaaatgtgcgcggaacccctatttgtttatttttctaaatacattcaaatatgtatccgctcatgagacaataaccctgataaatgcttcaataatattgaaaaaggaagagtatgagtattcaacatttccgtgtcgcccttattcccttttttgcggcattttgccttcctgtttttgctcacccagaaacgctggtgaaagtaaaagatgctgaagatcagttgggtgcacgagtgggttacatcgaactggatctcaacagcggtaagatccttgagagttttcgccccgaagaacgttttccaatgatgagcacttttaaagttctgctatgtggcgcggtattatcccgtattgacgccgggcaagagcaactcggtcgccgcatacactattctcagaatgacttggttgagtactcaccagtcacagaaaagcatcttacggatggcatgacagtaagagaattatgcagtgctgccataaccatgagtgataacactgcggccaacttacttctgacaacgatcggaggaccgaaggagctaaccgcttttttgcacaacatgggggatcatgtaactcgccttgatcgttgggaaccggagctgaatgaagccataccaaacgacgagcgtgacaccacgatgcctgtagcaatggcaacaacgttgcgcaaactattaactggcgaactacttactctagcttcccggcaacaattaatagactggatggaggcggataaagttgcaggaccacttctgcgctcggcccttccggctggctggtttattgctgataaatctggagccggtgagcgtgggtctcgcggtatcattgcagcactggggccagatggtaagccctcccgtatcgtagttatctacacgacggggagtcaggcaactatggatgaacgaaatagacagatcgctgagataggtgcctcactgattaagcattggtaactgtcagaccaagtttactcatatatactttagattgatttaaaacttcatttttaatttaaaaggatctaggtgaagatcctttttgataatctcatgaccaaaatcccttaacgtgagttttcgttccactgagcgtcagaccccgtagaaaagatcaaaggatcttcttgagatcctttttttctgcgcgtaatctgctgcttgcaaacaaaaaaaccaccgctaccagcggtggtttgtttgccggatcaagagctaccaactctttttccgaaggtaactggcttcagcagagcgcagataccaaatactgtccttctagtgtagccgtagttaggccaccacttcaagaactctgtagcaccgcctacatacctcgctctgctaatcctgttaccagtggctgctgccagtggcgataagtcgtgtcttaccgggttggactcaagacgatagttaccggataaggcgcagcggtcgggctgaacggggggttcgtgcacacagcccagcttggagcgaacgacctacaccgaactgagatacctacagcgtgagcattgagaaagcgccacgcttcccgaagggagaaaggcggacaggtatccggtaagcggcagggtcggaacaggagagcgcacgagggagcttccagggggaaacgcctggtatctttatagtcctgtcgggtttcgccacctctgacttgagcgtcgatttttgtgatgctcgtcaggggggcggagcctatggaaaaacgccagcaacgcggcctttttacggttcctggccttttgctggccttttgctcacatgttctttcctgcgttatcccctgattctgtggataaccgtattaccgcctttgagtgagctgataccgctcgccgcagccgaacgaccgagcgcagcgagtcagtgagcgaggaagcggaagagcgcccaatacgcaaaccgcctctccccgcgcgttggccgattcattaatgcagctggcacgacaggtttcccgactggaaagcgggcagtgagcgcaacgcaattaatgtgagttagctcactcattaggcaccccaggctttacactttatgcttccggctcgtatgttgtgtggaattgtgagcggataacaatttcacacaggaaacagctatgaccatgattacgccaagcttacgcgtcctggcattatgcccagtacatgaccttatgggactttcctacttggcagtacatctacgtattagtcatcgctattaccatggtgatgcggttttggcagtacatcaatgggcgtggatagcggtttgactcacggggatttccaagtctccaccccattgacgtcaatgggagtttgttttggcaccaaaatcaacgggactttccaaaatgtcgtaacaactccgccccattgacgcaaatgggcggtaggcgtgtacggtgggaggtctatataagcagagctcgtttagtgaaccgtgg

SEQ ID NO: 25 - DNA, 11026 bp, Artificial Sequence
  Vector with soluble s4-1BBL ectodomain construct
gttgacattgattattgactagttattaatagtaatcaattacggggtcattagttcatagcccatatatggagttccgcgttacataacttacggtaaatggcccgcctggctgaccgcccaacgacccccgcccattgacgtcaataatgacgtatgttcccatagtaacgccaatagggactttccattgacgtcaatgggtggagtatttacggtaaactgcccacttggcagtacatcaagtgtatcatatgccaagtccgccccctattgacgtcaatgacggtaaatggcccgcctggcattatgcccagtacatgaccttacgggactttcctacttggcagtacatctacgtattagtcatcgctattaccatggtgatgcggttttggcagtacaccaatgggcgtggatagcggtttgactcacggggatttccaagtctccaccccattgacgtcaatgggagtttgttttggcaccaaaatcaacgggactttccaaaatgtcgtaataaccccgccccgttgacgcaaatgggcggtaggcgtgtacggtgggaggtctatataagcagagctcgtttagtgaaccgtcagatctctagaagctgggtaccagctgctagcaagcttgccaccatgcccatggggtctctgcaaccgctggccaccttgtacctgctggggatgctggtcgcttcctgcctcggaggctctggctccaactggagccacccccagttcgagaagggaggttctgggggccatcaccatcaccatcacggcggttcagggggaggctcacgaaacctcgttactgccttttcaaatatggatgacatgctgcaaaaggcgcacttggtcatcgaaggcacgtttatatacttgagagactctaccgagtttttcattcgggttcgagacggatggaaaaaattgcagcttggggaactgattccgatcccggcagacagtggatccttggacctgcggcagggcatgtttgcgcagctggtggcccaaaatgttctgctgatcgatgggcccctgagctggtacagtgacccaggcctggcaggcgtgtccctgacggggggcctgagctacaaagaggacacgaaggagctggtggtggccaaggctggagtctactatgtcttctttcaactagagctgcggcgcgtggtggccggcgagggctcaggctccgtttcacttgcgctgcacctgcagccactgcgctctgctgctggggccgccgccctggctttgaccgtggacctgccacccgcctcctccgaggctcggaactcggccttcggtttccagggccgcttgctgcacctgagtgccggccagcgcctgggcgtccatcttcacactgaggccagggcacgccatgcctggcagcttacccagggcgccacagtcttgggactcttccgggtgacccccgaaatcccagccggactcccttcaccgaggtcggaataagcggccgcagatccagacatgataagatacattgatgagtttggacaaaccacaactagaatgcagtgaaaaaaatgctttatttgtgaaatttgtgatgctattgctttatttgtaaccattataagctgcaataaacaagttaacaacaacaattgcattcattttatgtttcaggttcagggggaggtgtgggaggttttttaaagcaagtaaaacctctacaaatgtggtatggctgattatgatccggctgcctcgcgcgtttcggtgatgacggtgaaaacctctgacacatgcagctcccggagacggtcacagcttgtctgtaagcggatgccgggagcagacaagcccgtcaggcgtcagcgggtgttggcgggtgtcggggcgcagccatgaggtcgactctagaggatcgatgccccgccccggacgaactaaacctgactacgacatctctgccccttcttcgcggggcagtgcatgtaatcccttcagttggttggtacaacttgccaactgggccctgttccacatgtgacacggggggggaccaaacacaaaggggttctctgactgtagttgacatccttataaatggatgtgcacatttgccaacactgagtggctttcatcctggagcagactttgcagtctgtggactgcaacacaacattgcctttatgtgtaactcttggctgaagctcttacaccaatgctgggggacatgtacctcccaggggcccaggaagactacgggaggctacaccaacgtcaatcagaggggcctgtgtagctaccgataagcggaccctcaagagggcattagcaatagtgtttataaggcccccttgttaaccctaaacgggtagcatatgcttcccgggtagtagtatatactatccagactaaccctaattcaatagcatatgttacccaacgggaagcatatgctatcgaattagggttagtaaaagggtcctaaggaacagcgatatctcccaccccatgagctgtcacggttttatttacatggggtcaggattccacgagggtagtgaaccattttagtcacaagggcagtggctgaagatcaaggagcgggcagtgaactctcctgaatcttcgcctgcttcttcattctccttcgtttagctaatagaataactgctgagttgtgaacagtaaggtgtatgtgaggtgctcgaaaacaaggtttcaggtgacgcccccagaataaaatttggacggggggttcagtggtggcattgtgctatgacaccaatataaccctcacaaaccccttgggcaataaatactagtgtaggaatgaaacattctgaatatctttaacaatagaaatccatggggtggggacaagccgtaaagactggatgtccatctcacacgaatttatggctatgggcaacacataatcctagtgcaatatgatactggggttattaagatgtgtcccaggcagggaccaagacaggtgaaccatgttgttacactctatttgtaacaaggggaaagagagtggacgccgacagcagcggactccactggttgtctctaacacccccgaaaattaaacggggctccacgccaatggggcccataaacaaagacaagtggccactcttttttttgaaattgtggagtgggggcacgcgtcagcccccacacgccgccctgcggttttggactgtaaaataagggtgtaataacttggctgattgtaaccccgctaaccactgcggtcaaaccacttgcccacaaaaccactaatggcaccccggggaatacctgcataagtaggtgggcgggccaagataggggcgcgattgctgcgatctggaggacaaattacacacacttgcgcctgagcgccaagcacagggttgttggtcctcatattcacgaggtcgctgagagcacggtgggctaatgttgccatgggtagcatatactacccaaatatctggatagcatatgctatcctaatctatatctgggtagcataggctatcctaatctatatctgggtagcatatgctatcctaatctatatctgggtagtatatgctatcctaatttatatctgggtagcataggctatcctaatctatatctgggtagcatatgctatcctaatctatatctgggtagtatatgctatcctaatctgtatccgggtagcatatgctatcctaatagagattagggtagtatatgctatcctaatttatatctgggtagcatatactacccaaatatctggatagcatatgctatcctaatctatatctgggtagcatatgctatcctaatctatatctgggtagcataggctatcctaatctatatctgggtagcatatgctatcctaatctatatctgggtagtatatgctatcctaatttatatctgggtagcataggctatcctaatctatatctgggtagcatatgctatcctaatctatatctgggtagtatatgctatcctaatctgtatccgggtagcatatgctatcctcatgcatatacagtcagcatatgatacccagtagtagagtgggagtgctatcctttgcatatgccgccacctcccaagggggcgtgaattttcgctgcttgtccttttcctgctggttgctcccattcttaggtgaatttaaggaggccaggctaaagccgtcgcatgtctgattgctcaccaggtaaatgtcgctaatgttttccaacgcgagaaggtgttgagcgcggagctgagtgacgtgacaacatgggtatgcccaattgccccatgttgggaggacgaaaatggtgacaagacagatggccagaaatacaccaacagcacgcatgatgtctactggggatttattctttagtgcgggggaatacacggcttttaatacgattgagggcgtctcctaacaagttacatcactcctgcccttcctcaccctcatctccatcacctccttcatctccgtcatctccgtcatcaccctccgcggcagccccttccaccataggtggaaaccagggaggcaaatctactccatcgtcaaagctgcacacagtcaccctgatattgcaggtaggagcgggctttgtcataacaaggtccttaatcgcatccttcaaaacctcagcaaatatatgagtttgtaaaaagaccatgaaataacagacaatggactcccttagcgggccaggttgtgggccgggtccaggggccattccaaaggggagacgactcaatggtgtaagacgacattgtggaatagcaagggcagttcctcgccttaggttgtaaagggaggtcttactacctccatatacgaacacaccggcgacccaagttccttcgtcggtagtcctttctacgtgactcctagccaggagagctcttaaaccttctgcaatgttctcaaatttcgggttggaacctccttgaccacgatgctttccaaaccaccctccttttttgcgcctgcctccatcaccctgaccccggggtccagtgcttgggccttctcctgggtcatctgcggggccctgctctatcgctcccgggggcacgtcaggctcaccatctgggccaccttcttggtggtattcaaaataatcggcttcccctacagggtggaaaaatggccttctacctggagggggcctgcgcggtggagacccggatgatgatgactgactactgggactcctgggcctcttttctccacgtccacgacctctccccctggctctttcacgacttccccccctggctctttcacgtcctctaccccggcggcctccactacctcctcgaccccggcctccactacctcctcgaccccggcctccactgcctcctcgaccccggcctccacctcctgctcctgcccctcctgctcctgcccctcctcctgctcctgcccctcctgcccctcctgctcctgcccctcctgcccctcctgctcctgcccctcctgcccctcctgctcctgcccctcctgcccctcctcctgctcctgcccctcctgcccctcctcctgctcctgcccctcctgcccctcctgctcctgcccctcctgcccctcctgctcctgcccctcctgcccctcctgctcctgcccctcctgctcctgcccctcctgctcctgcccctcctgctcctgcccctcctgcccctcctgcccctcctcctgctcctgcccctcctgctcctgcccctcctgcccctcctgcccctcctgctcctgcccctcctcctgctcctgcccctcctgcccctcctgcccctcctcctgctcctgcccctcctgcccctcctcctgctcctgcccctcctcctgctcctgcccctcctgcccctcctgcccctcctcctgctcctgcccctcctgcccctcctcctgctcctgcccctcctcctgctcctgcccctcctgcccctcctgcccctcctcctgctcctgcccctcctcctgctcctgcccctcctgcccctcctgcccctcctgcccctcctcctgctcctgcccctcctcctgctcctgcccctcctgctcctgcccctcccgctcctgctcctgctcctgttccaccgtgggtccctttgcagccaatgcaacttggacgtttttggggtctccggacaccatctctatgtcttggccctgatcctgagccgcccggggctcctggtcttccgcctcctcgtcctcgtcctcttccccgtcctcgtccatggttatcaccccctcttctttgaggtccactgccgccggagccttctggtccagatgtgtctcccttctctcctaggccatttccaggtcctgtacctggcccctcgtcagacatgattcacactaaaagagatcaatagacatctttattagacgacgctcagtgaatacagggagtgcagactcctgccccctccaacagcccccccaccctcatccccttcatggtcgctgtcagacagatccaggtctgaaaattccccatcctccgaaccatcctcgtcctcatcaccaattactcgcagcccggaaaactcccgctgaacatcctcaagatttgcgtcctgagcctcaagccaggcctcaaattcctcgtccccctttttgctggacggtagggatggggattctcgggacccctcctcttcctcttcaaggtcaccagacagagatgctactggggcaacggaagaaaagctgggtgcggcctgtgaggatcagcttatcgatgataagctgtcaaacatgagaattcttgaagacgaaagggcctcgtgatacgcctatttttataggttaatgtcatgataataatggtttcttagacgtcaggtggcacttttcggggaaatgtgcgcggaacccctatttgtttatttttctaaatacattcaaatatgtatccgctcatgagacaataaccctgataaatgcttcaataatattgaaaaaggaagagtatgagtattcaacatttccgtgtcgcccttattcccttttttgcggcattttgccttcctgtttttgctcacccagaaacgctggtgaaagtaaaagatgctgaagatcagttgggtgcacgagtgggttacatcgaactggatctcaacagcggtaagatccttgagagttttcgccccgaagaacgttttccaatgatgagcacttttaaagttctgctatgtggcgcggtattatcccgtgttgacgccgggcaagagcaactcggtcgccgcatacactattctcagaatgacttggttgagtactcaccagtcacagaaaagcatcttacggatggcatgacagtaagagaattatgcagtgctgccataaccatgagtgataacactgcggccaacttacttctgacaacgatcggaggaccgaaggagctaaccgcttttttgcacaacatgggggatcatgtaactcgccttgatcgttgggaaccggagctgaatgaagccataccaaacgacgagcgtgacaccacgatgcctgcagcaatggcaacaacgttgcgcaaactattaactggcgaactacttactctagcttcccggcaacaattaatagactggatggaggcggataaagttgcaggaccacttctgcgctcggcccttccggctggctggtttattgctgataaatctggagccggtgagcgtgggtctcgcggtatcattgcagcactggggccagatggtaagccctcccgtatcgtagttatctacacgacggggagtcaggcaactatggatgaacgaaatagacagatcgctgagataggtgcctcactgattaagcattggtaactgtcagaccaagtttactcatatatactttagattgatttaaaacttcatttttaatttaaaaggatctaggtgaagatcctttttgataatctcatgaccaaaatcccttaacgtgagttttcgttccactgagcgtcagaccccgtagaaaagatcaaaggatcttcttgagatcctttttttctgcgcgtaatctgctgcttgcaaacaaaaaaaccaccgctaccagcggtggtttgtttgccggatcaagagctaccaactctttttccgaaggtaactggcttcagcagagcgcagataccaaatactgtccttctagtgtagccgtagttaggccaccacttcaagaactctgtagcaccgcctacatacctcgctctgctaatcctgttaccagtggctgctgccagtggcgataagtcgtgtcttaccgggttggactcaagacgatagttaccggataaggcgcagcggtcgggctgaacggggggttcgtgcacacagcccagcttggagcgaacgacctacaccgaactgagatacctacagcgtgagctatgagaaagcgccacgcttcccgaagggagaaaggcggacaggtatccggtaagcggcagggtcggaacaggagagcgcacgagggagcttccagggggaaacgcctggtatctttatagtcctgtcgggtttcgccacctctgacttgagcgtcgatttttgtgatgctcgtcaggggggcggagcctatggaaaaacgccagcaacgcggcctttttacggttcctggccttttgctggccttgaagctgtccctgatggtcgtcatctacctgcctggacagcatggcctgcaacgcgggcatcccgatgccgccggaagcgagaagaatcataatggggaaggccatccagcctcgcgtcgcgaacgccagcaagacgtagcccagcgcgtcggccccgagatgcgccgcgtgcggctgctggagatggcggacgcgatggatatgttctgccaagggttggtttgcgcattcacagttctccgcaagaattgattggctccaattcttggagtggtgaatccgttagcgaggtgccgccctgcttcatccccgtggcccgttgctcgcgtttgctggcggtgtccccggaagaaatatatttgcatgtctttagttctatgatgacacaaaccccgcccagcgtcttgtcattggcgaattcgaacacgcagatgcagtcggggcggcgcggtccgaggtccacttcgcatattaaggtgacgcgtgtggcctcgaacaccgagcgaccctgcagcgacccgcttaacagcgtcaacagcgtgccgcagatcccggggggcaatgagatatgaaaaagcctgaactcaccgcgacgtctgtcgagaagtttctgatcgaaaagttcgacagcgtctccgacctgatgcagctctcggagggcgaagaatctcgtgctttcagcttcgatgtaggagggcgtggatatgtcctgcgggtaaatagctgcgccgatggtttctacaaagatcgttatgtttatcggcactttgcatcggccgcgctcccgattccggaagtgcttgacattggggaattcagcgagagcctgacctattgcatctcccgccgtgcacagggtgtcacgttgcaagacctgcctgaaaccgaactgcccgctgttctgcagccggtcgcggaggccatggatgcgatcgctgcggccgatcttagccagacgagcgggttcggcccattcggaccgcaaggaatcggtcaatacactacatggcgtgatttcatatgcgcgattgctgatccccatgtgtatcactggcaaactgtgatggacgacaccgtcagtgcgtccgtcgcgcaggctctcgatgagctgatgctttgggccgaggactgccccgaagtccggcacctcgtgcacgcggatttcggctccaacaatgtcctgacggacaatggccgcataacagcggtcattgactggagcgaggcgatgttcggggattcccaatacgaggtcgccaacatcttcttctggaggccgtggttggcttgtatggagcagcagacgcgctacttcgagcggaggcatccggagcttgcaggatcgccgcggctccgggcgtatatgctccgcattggtcttgaccaactctatcagagcttggttgacggcaatttcgatgatgcagcttgggcgcagggtcgatgcgacgcaatcgtccgatccggagccgggactgtcgggcgtacacaaatcgcccgcagaagcgcggccgtctggaccgatggctgtgtagaagtactcgccgatagtggaaaccgacgccccagcactcgtccggatcgggagatgggggaggctaactgaaacacggaaggagacaataccggaaggaacccgcgctatgacggcaataaaaagacagaataaaacgcacgggtgttgggtcgtttgttcataaacgcggggttcggtcccagggctggcactctgtcgataccccaccgagaccccattggggccaatacgcccgcgtttcttccttttccccaccccaccccccaagttcgggtgaaggcccagggctcgcagccaacgtcggggcggcaggccctgccatagccactggccccgtgggttagggacggggtcccccatggggaatggtttatggttcgtgggggttattattttgggcgttgcgtggggtcaggtccacgactggactgagcagacagacccatggtttttggatggcctgggcatggaccgcatgtactggcgcgacacgaacaccgggcgtctgtggctgccaaacacccccgacccccaaaaaccaccgcgcggatttctggcgtgccaagctagtcgaccaattctcatgtttgacagcttatcatcgcagatccgggcaacgttgttgccattgctgcaggcgcagaactggtaggtatggaagatctatacattgaatcaatattggcaattagccatattagtcattggttatatagcataaatcaatattggctattggccattgcatacgttgtatctatatcataatatgtacatttatattggctcatgtccaatatgaccgccat

SEQ ID NO: 26 - DNA, 20487 bp, Artificial Sequence
  Vector with soluble s4-1BBL ectodomain construct
accaaacaaagttgggtaaggatagttcaatcaatgatcatcttctagtgcacttaggattcaagatcctattatcagggacaagagcaggattagggatatctcgaggcgcgtgccaccatgcccatggggtctctgcaaccgctggccaccttgtacctgctggggatgctggtcgcttcctgcctcggaggctcacgaaacctcgttactgccttttcaaatatggatgacatgctgcaaaaggcgcacttggtcatcgaaggcacgtttatatacttgagagactctaccgagtttttcattcgggttcgagacggatggaaaaaattgcagcttggggaactgattccgatcccggcagacagtggatccttggacctgcggcagggcatgtttgcgcagctggtggcccaaaatgttctgctgatcgatgggcccctgagctggtacagtgacccaggcctggcaggcgtgtccctgacggggggcctgagctacaaagaggacacgaaggagctggtggtggccaaggctggagtctactatgtcttctttcaactagagctgcggcgcgtggtggccggcgagggctcaggctccgtttcacttgcgctgcacctgcagccactgcgctctgctgctggggccgccgccctggctttgaccgtggacctgccacccgcctcctccgaggctcggaactcggccttcggtttccagggccgcttgctgcacctgagtgccggccagcgcctgggcgtccatcttcacactgaggccagggcacgccatgcctggcagcttacccagggcgccacagtcttgggactcttccgggtgacccccgaaatcccagccggactcccttcaccgaggtcggaataaacgcgccatccatcattgttataaaaaacttaggattcaagatcctattatcagggacaagagcaggattagggatatccgagatggccacacttttaaggagcttagcattgttcaaaagaaacaaggacaaaccacccattacatcaggatccggtggagccatcagaggaatcaaacacattattatagtaccaatccctggagattcctcaattaccactcgatccagacttctggaccggttggtcaggttaattggaaacccggatgtgagcgggcccaaactaacaggggcactaataggtatattatccttatttgtggagtctccaggtcaattgattcagaggatcaccgatgaccctgacgttagcataaggctgttagaggttgtccagagtgaccagtcacaatctggccttaccttcgcatcaagaggtaccaacatggaggatgaggcggaccaatacttttcacatgatgatccaattagtagtgatcaatccaggttcggatggttcgagaacaaggaaatctcagatattgaagtgcaagaccctgagggattcaacatgattctgggtaccatcctagcccaaatttgggtcttgctcgcaaaggcggttacggccccagacacggcagctgattcggagctaagaaggtggataaagtacacccaacaaagaagggtggttggtgaatttagattggagagaaaatggttggatgtggtgaggaacaggattgccgaggacctctccttacgccgattcatggtcgctctaatcctggatatcaagagaacacccggaaacaaacccaggattgctgaaatgatatgtgacattgatacatatatcgtagaggcaggattagccagttttatcctgactattaagtttgggatagaaactatgtatcctgctcttggactgcatgaatttgctggtgagttatccacacttgagtccttgatgaacctttaccagcaaatgggggaaactgcaccctacatggtaatcctggagaactcaattcagaacaagttcagtgcaggatcataccctctgctctggagctatgccatgggagtaggagtggaacttgaaaactccatgggaggtttgaactttggccgatcttactttgatccagcatattttagattagggcaagagatggtaaggaggtcagctggaaaggtcagttccacattggcatctgaactcggtatcactgccgaggatgcaaggcttgtttcagagattgcaatgcatactactgaggacaagatcagtagagcggttggacccagacaagcccaagtatcatttctacacggtgatcaaagtgagaatgagctaccgagattggggggcaaggaagataggagggtcaaacagagtcgaggagaagccagggagagctacagagaaaccgggcccagcagagcaagtgatgcgagagctgcccatcttccaaccggcacacccctagacattgacactgcaacggagtccagccaagatccgcaggacagtcgaaggtcagctgacgccctgcttaggctgcaagccatggcaggaatctcggaagaacaaggctcagacacggacacccctatagtgtacaatgacagaaatcttctagactaggtgcgagaggccgagggccagaacaacatccgcctaccctccatcattgttataaaaaacttaggaaccaggtccacacagccgccagcccatcaaccatccactcccacgattggagccaatggcagaagagcaggcacgccatgtcaaaaacggactggaatgcatccgggctctcaaggccgagcccatcggctcactggccatcgaggaagctatggcagcatggtcagaaatatcagacaacccaggacaggagcgagccacctgcagggaagagaaggcaggcagttcgggtctcagcaaaccatgcctctcagcaattggatcaactgaaggcggtgcacctcgcatccgcggtcagggacctggagagagcgatgacgacgctgaaactttgggaatccccccaagaaatctccaggcatcaagcactgggttacagtgttattacgtttatgatcacagcggtgaagcggttaagggaatccaagatgctgactctatcatggttcaatcaggccttgatggtgatagcaccctctcaggaggagacaatgaatctgaaaacagcgatgtggatattggcgaacctgataccgagggatatgctatcactgaccggggatctgctcccatctctatggggttcagggcttctgatgttgaaactgcagaaggaggggagatccacgagctcctgagactccaatccagaggcaacaactttccgaagcttgggaaaactctcaatgttcctccgcccccggaccccggtagggccagcacttccgggacacccattaaaaagggcacagacgcgagattagcctcatttggaacggagatcgcgtctttattgacaggtggtgcaacccaatgtgctcgaaagtcaccctcggaaccatcagggccaggtgcacctgcggggaatgtccccgagtgtgtgagcaatgccgcactgatacaggagtggacacccgaatctggtaccacaatctccccgagatcccagaataatgaagaagggggagactattatgatgatgagctgttctctgatgtccaagatattaaaacagccttggccaaaatacacgaggataatcagaagataatctccaagctagaatcactgctgttattgaagggagaagttgagtcaattaagaagcagatcaacaggcaaaatatcagcatatccaccctggaaggacacctctcaagcatcatgatcgccattcctggacttgggaaggatcccaacgaccccactgcagatgtcgaaatcaatcccgacttgaaacccatcataggcagagattcaggccgagcactggccgaagttctcaagaaacccgttgccagccgacaactccaaggaatgacaaatggacggaccagttccagaggacagctgctgaaggaatttcagctaaagccgatcgggaaaaagatgagctcagccgtcgggtttgttcctgacaccggccctgcatcacgcagtgtaatccgctccattataaaatccagccggctagaggaggatcggaagcgttacctgatgactctccttgatgatatcaaaggagccaatgatcttgccaagttccaccagatgctgatgaagataataatgaagtagctacagctcaacttacctgccaaccccatgccagtcgacccaactagtacaacctaaatccattataaaaaacttaggagcaaagtgattgcctcccaagttccacaatgacagagacctacgacttcgacaagtcggcatgggacatcaaagggtcgatcgctccgatacaacccaccacctacagtgatggcaggctggtgccccaggtcagagtcatagatcctggtctaggcgacaggaaggatgaatgctttatgtacatgtttctgctgggggttgttgaggacagcgattccctagggcctccaatcgggcgagcatttgggtccctgcccttaggtgttggcagatccacagcaaagcccgaaaaactcctcaaagaggccactgagcttgacatagttgttagacgtacagcagggctcaatgaaaaactggtgttctacaacaacaccccactaactctcctcacaccttggagaaaggtcctaacaacagggagtgtcttcaacgcaaaccaagtgtgcaatgcggttaatctgataccgctcgataccccgcagaggttccgtgttgtttatatgagcatcacccgtctttcggataacgggtattacaccgttcctagaagaatgctggaattcagatcggtcaatgcagtggccttcaacctgctggtgacccttaggattgacaaggcgataggccctgggaagatcatcgacaatacagagcaacttcctgaggcaacatttatggtccacatcgggaacttcaggagaaagaagagtgaagtctactctgccgattattgcaaaatgaaaatcgaaaagatgggcctggtttttgcacttggtgggatagggggcaccagtcttcacattagaagcacaggcaaaatgagcaagactctccatgcacaactcgggttcaagaagaccttatgttacccgctgatggatatcaatgaagaccttaatcgattactctggaggagcagatgcaagatagtaagaatccaggcagttttgcagccatcagttcctcaagaattccgcatttacgacgacgtgatcataaatgatgaccaaggactattcaaagttctgtagaccgtagtgcccagcaatgcccgaaaacgacccccctcacaatgacagccagaaggcccggacaaaaaagccccctccgaaagactccacggaccaagcgagaggccagccagcagccgacggcaagcgcgaacaccaggcggccccagcacagaacagccccgacacaaggccaccaccagccaccccaatctgcatcctcctcgtgggacccccgaggaccaacccccaaggctgcccccgatccaaaccaccaaccgcatccccaccacccccgggaaagaaacccccagcaattggaaggcccctccccctcttcctcaacacaagaactccacaaccgaaccgcacaagcgaccgaggtgacccaaccgcaggcatccgactccctagacagatcctctctccccggcaaactaaacaaaacttagggccaaggaacatacacacccaacagaacccagaccccggcccacggcgccgcgcccccaacccccgacaaccagagggagcccccaaccaatcccgccggctcccccggtgcccacaggcagggacaccaacccccgaacagacccagcacccaaccatcgacaatccaagacgggggggcccccccaaaaaaaggcccccaggggccgacagccagcaccgcgaggaagcccacccaccccacacacgaccacggcaaccaaaccagaacccagaccaccctgggccaccagctcccagactcggccatcaccccgcagaaaggaaaggccacaacccgcgcaccccagccccgatccggcggggagccacccaacccgaaccagcacccaagagcgatccccgaaggacccccgaaccgcaaaggacaccagtatcccacagcctctccaagtcccccggtctcctcctcttctcgaagggaccaaaagatcaatccaccacacccgacgacactcaactccccacccctaaaggagacaccgggaatcccagaatcaagactcatccaatgtccatcatgggtctcaaggtgaacgtctctgccatattcatggcagtactgttaactctccaaacacccaccggtcaaatccattggggcaatctctctaagataggggtggtaggaataggaagtgcaagctacaaagttatgactcgttccagccatcaatcattagtcataaaattaatgcccaatataactctcctcaataactgcacgagggtagagattgcagaatacaggagactactgagaacagttttggaaccaattagagatgcacttaatgcaatgacccagaatataagaccggttcagagtgtagcttcaagtaggagacacaagagatttgcgggagtagtcctggcaggtgcggccctaggcgttgccacagctgctcagataacagccggcattgcacttcaccagtccatgctgaactctcaagccatcgacaatctgagagcgagcctggaaactactaatcaggcaattgaggcaatcagacaagcagggcaggagatgatattggctgttcagggtgtccaagactacatcaataatgagctgataccgtctatgaaccaactatcttgtgatttaatcggccagaagctcgggctcaaattgctcagatactatacagaaatcctgtcattatttggccccagtttacgggaccccatatctgcggagatatctatccaggctttgagctatgcgcttggaggagacatcaataaggtgttagaaaagctcggatacagtggaggtgatttactgggcatcttagagagcggaggcatcaaggcccggataactcacgtcgacacagagtcctacttcattgtcctcagtatagcctatccgacgctgtccgagattaagggggtgattgtccaccggctagagggggtctcgtacaacataggctctcaagagtggtataccactgtgcccaagtatgttgcaacccaagggtaccttatctcgaattttgatgagtcatcgtgtactttcatgccagaggggactgtgtgcagccaaaatgccttgtacccgatgagtcctctgctccaagaatgcctccgggggtacaccaagtcctgtgctcgtacactcgtatccgggtcttttgggaaccggttcattttatcacaagggaacctaatagccaattgtgcatcaatcctttgcaagtgttacacaacaggaacgatcattaatcaagaccctgacaagatcctaacatacattgctgccgatcactgcccggtagtcgaggtgaacggcgtgatcatccaagtcgggagcaggaggtatccagacgctgtgtacttgcacagaattgacctcggtcctcccatatcattggagaggttggacgtagggacaaatctggggaatgcaattgctaagttggaggatgccaaggaattgttggagtcatcggaccagatattgaggagtatgaaaggtttatcgagcactagcatagtctacatcctgattgcagtgtgtcttggagggttgatagggatccccgctttaatatgttgctgcagggggcgttgtaacaaaaagggagaacaagttggtatgtcaagaccaggcctaaagcctgatcttacgggaacatcaaaatcctatgtaaggtcgctctgatcctctacaactcttgaaacacaaatgtcccacaagtctcctcttcgtcatcaagcaaccaccgcacccagcatcaagcccacctgaaattatctccggcttccctctggccgaacaatatcggtagttaattaaaacttagggtgcaagatcatccacaatgtcaccacaacgagaccggataaatgccttctacaaagataacccccatcccaagggaagtaggatagtcattaacagagaacatcttatgattgatagaccttatgttttgctggctgttctgtttgtcatgtttctgagcttgatcgggttgctagccattgcaggcattagacttcatcgggcagccatctacaccgcagagatccataaaagcctcagcaccaatctagatgtaactaactcaatcgagcatcaggtcaaggacgtgctgacaccactcttcaaaatcatcggtgatgaagtgggcctgaggacacctcagagattcactgacctagtgaaattcatctctgacaagatcaagttccttaatccggatagggagtacgacttcagagatctcacttggtgtatcaacccgccagagagaatcaaattggattatgatcaatactgtgcagatgtggctgctgaagagctcatgaatgcattggtgaactcaactctactggagaccagaacaaccaatcagttcctagctgtctcaaagggaaactgctcagggcccactacaatcagaggtcaattctcaaacatgtcgctgtccctgttagacttgtatttaggtcgaggttacaatgtgtcatctatagtcactatgacatcccagggaatgtatgggggaacttacctagtggaaaagcctaatctgagcagcaaaaggtcagagttgtcacaactgagcatgtaccgagtgtttgaagtaggtgttatcagaaatccgggtttgggggctccggtgttccatatgacaaactatcttgagcaaccagtcagtaatgatctcagcaactgtatggtggctttgggggagctcaaactcgcagccctttgtcacggggaagattctatcacaattccctatcagggatcagggaaaggtgtcagcttccagctcgtcaagctaggtgtctggaaatccccaaccgacatgcaatcctgggtccccttatcaacggatgatccagtgatagacaggctttacctctcatctcacagaggtgttatcgctgacaatcaagcaaaatgggctgtcccgacaacacgaacagatgacaagttgcgaatggagacatgcttccaacaggcgtgtaagggtaaaatccaagcactctgcgagaatcccgagtgggcaccattgaaggataacaggattccttcatacggggtcttgtctgttgatctgagtctgacagttgagcttaaaatcaaaattgcttcgggattcgggccattgatcacacacggttcagggatggacctatacaaatccaaccacaacaatgtgtattggctgactatcccgccaatgaagaacctagccttaggtgtaatcaacacattggagtggataccgagattcaaggttagtccctacctcttcactgtcccaattaaggaagcaggcgaagactgccatgccccaacatacctacctgcggaggtggatggtgatgtcaaactcagttccaatctggtgattctacctggtcaagatctccaatatgttttggcaacctacgatacttccagggttgaacatgctgtggtttattacgtttacagcccaagccgctcattttcttacttttatccttttaggttgcctataaagggggtccccatcgaattacaagtggaatgcttcacatgggaccaaaaactctggtgccgtcacttctgtgtgcttgcggactcagaatctggtggacatatcactcactctgggatggtgggcatgggagtcagctgcacagtcacccgggaagatggaaccaatcgcagatagggctgctagtgaaccaatcacatgatgtcacccagacatcaggcatacccactagtgtgaaatagacatcagaattaagaaaaacgtagggtccaagtggttccccgttatggactcgctatctgtcaaccagatcttataccctgaagttcacctagatagcccgatagttaccaataagatagtagccatcctggagtatgctcgagtccctcacgcttacagcctggaggaccctacactgtgtcagaacatcaagcaccgcctaaaaaacggattttccaaccaaatgattataaacaatgtggaagttgggaatgtcatcaagtccaagcttaggagttatccggcccactctcatattccatatccaaattgtaatcaggatttatttaacatagaagacaaagagtcaacgaggaagatccgtgaactcctcaaaaaggggaattcgctgtactccaaagtcagtgataaggttttccaatgcttaagggacactaactcacggcttggcctaggctccgaattgagggaggacatcaaggagaaagttattaacttgggagtttacatgcacagctcccagtggtttgagccctttctgttttggtttacagtcaagactgagatgaggtcagtgattaaatcacaaacccatacttgccataggaggagacacacacctgtattcttcactggtagttcagttgagttgctaatctctcgtgaccttgttgctataatcagtaaagagtctcaacatgtatattacctgacatttgaactggttttgatgtattgtgatgtcatagaggggaggttaatgacagagaccgctatgactattgatgctaggtatacagagcttctaggaagagtcagatacatgtggaaactgatagatggtttcttccctgcactcgggaatccaacttatcaaattgtagccatgctggagcctctttcacttgcttacctgcagctgagggatataacagtagaactcagaggtgctttccttaaccactgctttactgaaatacatgatgttcttgaccaaaacgggttttctgatgaaggtacttatcatgagttaattgaagctctagattacattttcataactgatgacatacatctgacaggggagattttctcatttttcagaagtttcggccaccccagacttgaagcagtaacggctgctgaaaatgttaggaaatacatgaatcagcctaaagtcattgtgtatgagactctgatgaaaggtcatgccatattttgtggaatcataatcaacggctatcgtgacaggcacggaggcagttggccaccgctgaccctccccctgcatgctgcagacacaatccggaatgctcaagcttcaggtgaagggttaacacatgagcagtgcgttgataactggaaatcttttgctggagtgaaatttggctgctttatgcctcttagcctggatagtgatctgacaatgtacctaaaggacaaggcacttgctgctctccaaagggaatgggattcagtttacccgaaagagttcctgcgttacgaccctcccaagggaaccgggtcacggaggcttgtagatgttttccttaatgattcgagctttgacccatatgatgtgataatgtatgttgtaagtggagcttacctccatgaccctgagttcaacctgtcttacagcctgaaagaaaaggagatcaaggaaacaggtagactttttgctaaaatgacttacaaaatgagggcatgccaagtgattgctgaaaatctaatctcaaacgggattggcaaatattttaaggacaatgggatggccaaggatgagcacgatttgactaaggcactccacactctagctgtctcaggagtccccaaagatctcaaagaaagtcacaggggggggccagtcttaaaaacctactcccgaagcccagtccacacaagtaccaggaacgtgagagcagcaaaagggtttatagggttccctcaagtaattcggcaggaccaagacactgatcatccggagaatatggaagcttacgagacagtcagtgcatttatcacgactgatctcaagaagtactgccttaattggagatatgagaccatcagcttgtttgcacagaggctaaatgagatttacggattgccctcatttttccagtggctgcataagaggcttgagacctctgtcctgtatgtaagtgaccctcattgcccccccgaccttgacgcccatatcccgttatataaagtccccaatgatcaaatcttcattaagtaccctatgggaggtatagaagggtattgtcagaagctgtggaccatcagcaccattccctatctatacctggctgcttatgagagcggagtaaggattgcttcgttagtgcaaggggacaatcagaccatagccgtaacaaaaagggtacccagcacatggccctacaaccttaagaaacgggaagctgctagagtaactagagattactttgtaattcttaggcaaaggctacatgatattggccatcacctcaaggcaaatgagacaattgtttcatcacatttttttgtctattcaaaaggaatatattatgatgggctacttgtgtcccaatcactcaagagcatcgcaagatgtgtattctggtcagagactatagttgatgaaacaagggcagcatgcagtaatattgctacaacaatggctaaaagcatcgagagaggttatgaccgttaccttgcatattccctgaacgtcctaaaagtgatacagcaaattctgatctctcttggcttcacaatcaattcaaccatgacccgggatgtagtcatacccctcctcacaaacaacgacctcttaataaggatggcactgttgcccgctcctattggggggatgaattatctgaatatgagcaggctgtttgtcagaaacatcggtgatccagtaacatcatcaattgctgatctcaagagaatgattctcgcctcactaatgcctgaagagaccctccatcaagtaatgacacaacaaccgggggactcttcattcctagactgggctagcgacccttactcagcaaatcttgtatgtgtccagagcatcactagactcctcaagaacataactgcaaggtttgtcctgatccatagtccaaacccaatgttaaaaggattattccatgatgacagtaaagaagaggacgagggactggcggcattcctcatggacaggcatattatagtacctagggcagctcatgaaatcctggatcatagtgtcacaggggcaagagagtctattgcaggcatgctggataccacaaaaggcttgattcgagccagcatgaggaagggggggttaacctctcgagtgataaccagattgtccaattatgactatgaacaattcagagcagggatggtgctattgacaggaagaaagcgaaatgtcctcattgacaaagagtcatgttcagtgcagctggcgagagctctaagaagccatatgtgggcgaggctagctcgaggacggcctatttacggccttgaggtccctgatgtactagaatctatgcgaggccaccttattcggcgtcatgagacatgtgtcatctgcgagtgtggatcagtcaactacggatggttttttgtcccctcgggttgccaactggatgatattgacaaggaaacatcatccttgagagtcccatatattggttctaccactgatgagagaacagacatgaagcttgccttcgtaagagccccaagtcgatccttgcgatctgctgttagaatagcaacagtgtactcatgggcttacggtgatgatgatagctcttggaacgaagcctggttgttggctaggcaaagggccaatgtgagcctggaggagctaagggtgatcactcccatctcaacttcgactaatttagcgcataggttgagggatcgtagcactcaagtgaaatactcaggtacatcccttgtccgagtggcgaggtataccacaatctccaacgacaatctctcatttgtcatatcagataagaaggttgatactaactttatataccaacaaggaatgcttctagggttgggtgttttagaaacattgtttcgactcgagaaagataccggatcatctaacacggtattacatcttcacgtcgaaacagattgttgcgtgatcccgatgatagatcatcccaggatacccagctcccgcaagctagagctgagggcagagctatgtaccaacccattgatatatgataatgcacctttaattgacagagatgcaacaaggctatacacccagagccataggaggcaccttgtggaatttgttacatggtccacaccccaactatatcacattttagctaagtccacagcactatctatgattgacctggtaacaaaatttgagaaggaccatatgaatgaaatttcagctctcataggggatgacgatatcaatagtttcataactgagtttctgctcatagagccaagattattcactatctacttgggccagtgtgcggccatcaattgggcatttgatgtacattatcatagaccatcagggaaatatcagatgggtgagctgttgtcatcgttcctttctagaatgagcaaaggagtgtttaaggtgcttgtcaatgctctaagccacccaaagatctacaagaaattctggcattgtggtattatagagcctatccatggtccttcacttgatgctcaaaacttgcacacaactgtgtgcaacatggtttacacatgctatatgacctacctcgacctgttgttgaatgaagagttagaagagttcacatttctcttgtgtgaaagcgacgaggatgtagtaccggacagattcgacaacatccaggcaaaacacttatgtgttctggcagatttgtactgtcaaccagggacctgcccaccaattcgaggtctaagaccggtagagaaatgtgcagttctaaccgaccatatcaaggcagaggctatgttatctccagcaggatcttcgtggaacataaatccaattattgtagaccattactcatgctctctgacttatctccggcgaggatcgatcaaacagataagattgagagttgatccaggattcattttcgacgccctcgctgaggtaaatgtcagtcagccaaagatcggcagcaacaacatctcaaatatgagcatcaaggctttcagacccccacacgatgatgttgcaaaattgctcaaagatatcaacacaagcaagcacaatcttcccatttcagggggcaatctcgccaattatgaaatccatgctttccgcagaatcgggttgaactcatctgcttgctacaaagctgttgagatatcaacattaattaggagatgccttgagccaggggaggacggcttgttcttgggtgagggatcgggttctatgttgatcacttataaggagatacttaaactaaacaagtgcttctataatagtggggtttccgccaattctagatctggtcaaagggaattagcaccctatccctccgaagttggccttgtcgaacacagaatgggagtaggtaatattgtcaaagtgctctttaacgggaggcccgaagtcacgtgggtaggcagtgtagattgcttcaatttcatagttagtaatatccctacctctagtgtggggtttatccattcagatatagagaccttgcctgacaaagatactatagagaagctagaggaattggcagccatcttatcgatggctctgctcctgggcaaaataggatcaatactggtgattaagcttatgcctttcagcggggattttgttcagggatttataagttatgtagggtctcattatagagaagtgaaccttgtataccctagatacagcaacttcatctctactgaatcttatttggttatgacagatctcaaggctaaccggctaatgaatcctgaaaagattaagcagcagataattgaatcatctgtgaggacttcacctggacttataggtcacatcctatccattaagcaactaagctgcatacaagcaattgtgggagacgcagttagtagaggtgatatcaatcctactctgaaaaaacttacacctatagagcaggtgctgatcaattgcgggttggcaattaacggacctaagctgtgcaaagaattgatccaccatgatgttgcctcagggcaagatggattgcttaattctatactcatcctctacagggagttggcaagattcaaagacaaccaaagaagtcaacaagggatgttccacgcttaccccgtattggtaagtagcaggcaacgagaacttatatctaggatcacccgcaaattctgggggcacattcttctttactccgggaacagaaagttgataaataagtttatccagaatctcaagtccggctatctgatactagacttacaccagaatatcttcgttaagaatctatccaagtcagagaaacagattattatgacggggggtttgaaacgtgagtgggtttttaaggtaacagtcaaggagaccaaagaatggtataagttagtcggatacagtgccctgattaaggactaattggttgaactccggaaccctaatcctgccctaggtggttaggcattatttgcaatatattaaagaaaactttgaaaatacgaagtttctattcccagctttgtctggtggccggcatggtcccagcctcctcgctggcgccggctgggcaacattccgaggggaccgtcccctcggtaatggcgaatgggacgcggccggtcgatcgacgatccggctgctaacaaagcccgaaaggaagctgagttggctgctgccaccgctgagcaataactagcataaccccttggggcctctaaacgggtcttgaggggttttttgctgaaaggaggaactatatccggatcgagatcaattctgtgagcgtatggcaaacgaaggaaaaatagttatagtagccgcactcgatgggacatttcaacgtaaaccgtttaataatattttgaatcttattccattatctgaaatggtggtaaaactaactgctgtgtgtatgaaatgctttaaggaggcttccttttctaaacgattgggtgaggaaaccgagatagaaataataggaggtaatgatatgtatcaatcggtgtgtagaaagtgttacatcgactcataatattatattttttatctaaaaaactaaaaataaacattgattaaattttaatataatacttaaaaatggatgttgtgtcgttagataaaccgtttatgtattttgaggaaattgataatgagttagattacgaaccagaaagtgcaaatgaggtcgcaaaaaaactgccgtatcaaggacagttaaaactattactaggagaattattttttcttagtaagttacagcgacacggtatattagatggtgccaccgtagtgtatataggatctgctcccggtacacatatacgttatttgagagatcatttctataatttaggagtgatcccgaaaggaagctgagttggctgctgccaccgctgagcaataactagcataaccccttggggcctctaaacgggtcttgaggggttttttgctgaaaggaggaacgcgcctgatgcggtattttctccttacgcatctgtgcggtatttcacaccgcatatatggtgcactctcagtacaatctgctctgatgccgcatagttaagccagccccgacacccgccaacacccgctgacgcgccctgacgggcttgtctgctcccggcatccgcttacagacaagctgtgaccgtctccgggagctgcatgtgtcagaggttttcaccgtcatcaccgaaacgcgcgagacgaaagggcctcgtgatacgcctatttttataggttaatgtcatgataataatggtttcttagacgtcaggtggcacttttcggggaaatgtgcgcggaacccctatttgtttatttttctaaatacattcaaatatgtatccgctcatgagacaataaccctgataaatgcttcaataatattgaaaaaggaagagtatgagtattcaacatttccgtgtcgcccttattcccttttttgcggcattttgccttcctgtttttgctcacccagaaacgctggtgaaagtaaaagatgctgaagatcagttgggtgcacgagtgggttacatcgaactggatctcaacagcggtaagatccttgagagttttcgccccgaagaacgttttccaatgatgagcacttttaaagttctgctatgtggcgcggtattatcccgtattgacgccgggcaagagcaactcggtcgccgcatacactattctcagaatgacttggttgagtactcaccagtcacagaaaagcatcttacggatggcatgacagtaagagaattatgcagtgctgccataaccatgagtgataacactgcggccaacttacttctgacaacgatcggaggaccgaaggagctaaccgcttttttgcacaacatgggggatcatgtaactcgccttgatcgttgggaaccggagctgaatgaagccataccaaacgacgagcgtgacaccacgatgcctgtagcaatggcaacaacgttgcgcaaactattaactggcgaactacttactctagcttcccggcaacaattaatagactggatggaggcggataaagttgcaggaccacttctgcgctcggcccttccggctggctggtttattgctgataaatctggagccggtgagcgtgggtctcgcggtatcattgcagcactggggccagatggtaagccctcccgtatcgtagttatctacacgacggggagtcaggcaactatggatgaacgaaatagacagatcgctgagataggtgcctcactgattaagcattggtaactgtcagaccaagtttactcatatatactttagattgatttaaaacttcatttttaatttaaaaggatctaggtgaagatcctttttgataatctcatgaccaaaatcccttaacgtgagttttcgttccactgagcgtcagaccccgtagaaaagatcaaaggatcttcttgagatcctttttttctgcgcgtaatctgctgcttgcaaacaaaaaaaccaccgctaccagcggtggtttgtttgccggatcaagagctaccaactctttttccgaaggtaactggcttcagcagagcgcagataccaaatactgtccttctagtgtagccgtagttaggccaccacttcaagaactctgtagcaccgcctacatacctcgctctgctaatcctgttaccagtggctgctgccagtggcgataagtcgtgtcttaccgggttggactcaagacgatagttaccggataaggcgcagcggtcgggctgaacggggggttcgtgcacacagcccagcttggagcgaacgacctacaccgaactgagatacctacagcgtgagcattgagaaagcgccacgcttcccgaagggagaaaggcggacaggtatccggtaagcggcagggtcggaacaggagagcgcacgagggagcttccagggggaaacgcctggtatctttatagtcctgtcgggtttcgccacctctgacttgagcgtcgatttttgtgatgctcgtcaggggggcggagcctatggaaaaacgccagcaacgcggcctttttacggttcctggccttttgctggccttttgctcacatgttctttcctgcgttatcccctgattctgtggataaccgtattaccgcctttgagtgagctgataccgctcgccgcagccgaacgaccgagcgcagcgagtcagtgagcgaggaagcggaagagcgcccaatacgcaaaccgcctctccccgcgcgttggccgattcattaatgcagctggcacgacaggtttcccgactggaaagcgggcagtgagcgcaacgcaattaatgtgagttagctcactcattaggcaccccaggctttacactttatgcttccggctcgtatgttgtgtggaattgtgagcggataacaatttcacacaggaaacagctatgaccatgattacgccaagcttacgcgtcctggcattatgcccagtacatgaccttatgggactttcctacttggcagtacatctacgtattagtcatcgctattaccatggtgatgcggttttggcagtacatcaatgggcgtggatagcggtttgactcacggggatttccaagtctccaccccattgacgtcaatgggagtttgttttggcaccaaaatcaacgggactttccaaaatgtcgtaacaactccgccccattgacgcaaatgggcggtaggcgtgtacggtgggaggtctatataagcagagctcgtttagtgaaccgtgg

SEQ ID NO: 27 - DNA, 35245 bp, Artificial Sequence
  Vector with soluble s4-1BBL ectodomain construct
catcatcaataatataccttattttggattgaagccaatatgataatgagggggtggagtttgtgacgtggcgcggggcgtgggaacggggcgggtgacgtagtagtgtggcggaagtgtgatgttgcaagtgtggcggaacacatgtaagcgacggatgtggcaaaagtgacgtttttggtgtgcgccggtgtacacaggaagtgacaattttcgcgcggttttaggcggatgttgtagtaaatttgggcgtaaccgagtaagatttggccattttcgcgggaaaactgaataagaggaagtgaaatctgaataattttgtgttactcatagcgcgtaatatttgtctagggccgcggggactttgaccgtttacgtggagactcgcccaggtgtttttctcaggtgttttccgcgttccgggtcaaagttggcgttttattattatagtcagtcgaagcttggatccggtacctctagaattctcgagcggccgctagcgacatcggatctcccgatcccctatggtcgactctcagtacaatctgctctgatgccgcatagttaagccagtatctgctccctgcttgtgtgttggaggtcgctgagtagtgcgcgagcaaaatttaagctacaacaaggcaaggcttgaccgacaattgcatgaagaatctgcttagggttaggcgttttgcgctgcttcgcgatgtacgggccagatatacgcgttgacattgattattgactagttattaatagtaatcaattacggggtcattagttcatagcccatatatggagttccgcgttacataacttacggtaaatggcccgcctggctgaccgcccaacgacccccgcccattgacgtcaataatgacgtatgttcccatagtaacgccaatagggactttccattgacgtcaatgggtggactatttacggtaaactgcccacttggcagtacatcaagtgtatcatatgccaagtacgccccctattgacgtcaatgacggtaaatggcccgcctggcattatgcccagtacatgaccttatgggactttcctacttggcagtacatctacgtattagtcatcgctattaccatggtgatgcggttttggcagtacatcaatgggcgtggatagcggtttgactcacggggatttccaagtctccaccccattgacgtcaatgggagtttgttttggcaccaaaatcaacgggactttccaaaatgtcgtaacaactccgccccattgacgcaaatgggcggtaggcgtgtacggtgggaggtctatataagcagagctctctggctaactagagaacccactgcttactggcttatcgaaattaatacgactcactatagggagacccaagctggctagttaagctatcaacaagtttgtacaaaaaagcaggctgccaccatgcccatggggtctctgcaaccgctggccaccttgtacctgctggggatgctggtcgcttcctgcctcggaggctcacgaaacctcgttactgccttttcaaatatggatgacatgctgcaaaaggcgcacttggtcatcgaaggcacgtttatatacttgagagactctaccgagtttttcattcgggttcgagacggatggaaaaaattgcagcttggggaactgattccgatcccggcagacagtggatccttggacctgcggcagggcatgtttgcgcagctggtggcccaaaatgttctgctgatcgatgggcccctgagctggtacagtgacccaggcctggcaggcgtgtccctgacggggggcctgagctacaaagaggacacgaaggagctggtggtggccaaggctggagtctactatgtcttctttcaactagagctgcggcgcgtggtggccggcgagggctcaggctccgtttcacttgcgctgcacctgcagccactgcgctctgctgctggggccgccgccctggctttgaccgtggacctgccacccgcctcctccgaggctcggaactcggccttcggtttccagggccgcttgctgcacctgagtgccggccagcgcctgggcgtccatcttcacactgaggccagggcacgccatgcctggcagcttacccagggcgccacagtcttgggactcttccgggtgacccccgaaatcccagccggactcccttcaccgaggtcggaataaacccagctttcttgtacaaagtggttgatctagagggcccgcggttcgaaggtaagcctatccctaaccctctcctcggtctcgattctacgcgtaccggttagtaatgagtttaaacgggggaggctaactgaaacacggaaggagacaataccggaaggaacccgcgctatgacggcaataaaaagacagaataaaacgcacgggtgttgggtcgtttgttcataaacgcggggttcggtcccagggctggcactctgtcgataccccaccgagaccccattggggccaatacgcccgcgtttcttccttttccccaccccaccccccaagttcgggtgaaggcccagggctcgcagccaacgtcggggcggcaggccctgccatagcagatccgattcgacagatcactgaaatgtgtgggcgtggcttaagggtgggaaagaatatataaggtgggggtcttatgtagttttgtatctgttttgcagcagccgccgccgccatgagcaccaactcgtttgatggaagcattgtgagctcatatttgacaacgcgcatgcccccatgggccggggtgcgtcagaatgtgatgggctccagcattgatggtcgccccgtcctgcccgcaaactctactaccttgacctacgagaccgtgtctggaacgccgttggagactgcagcctccgccgccgcttcagccgctgcagccaccgcccgcgggattgtgactgactttgctttcctgagcccgcttgcaagcagtgcagcttcccgttcatccgcccgcgatgacaagttgacggctcttttggcacaattggattctttgacccgggaacttaatgtcgtttctcagcagctgttggatctgcgccagcaggtttctgccctgaaggcttcctcccctcccaatgcggtttaaaacataaataaaaaaccagactctgtttggatttggatcaagcaagtgtcttgctgtctttatttaggggttttgcgcgcgcggtaggcccgggaccagcggtctcggtcgttgagggtcctgtgtattttttccaggacgtggtaaaggtgactctggatgttcagatacatgggcataagcccgtctctggggtggaggtagcaccactgcagagcttcatgctgcggggtggtgttgtagatgatccagtcgtagcaggagcgctgggcgtggtgcctaaaaatgtctttcagtagcaagctgattgccaggggcaggcccttggtgtaagtgtttacaaagcggttaagctgggatgggtgcatacgtggggatatgagatgcatcttggactgtatttttaggttggctatgttcccagccatatccctccggggattcatgttgtgcagaaccaccagcacagtgtatccggtgcacttgggaaatttgtcatgtagcttagaaggaaatgcgtggaagaacttggagacgcccttgtgacctccaagattttccatgcattcgtccataatgatggcaatgggcccacgggcggcggcctgggcgaagatatttctgggatcactaacgtcatagttgtgttccaggatgagatcgtcataggccatttttacaaagcgcgggcggagggtgccagactgcggtataatggttccatccggcccaggggcgtagttaccctcacagatttgcatttcccacgctttgagttcagatggggggatcatgtctacctgcggggcgatgaagaaaacggtttccggggtaggggagatcagctgggaagaaagcaggttcctgagcagctgcgacttaccgcagccggtgggcccgtaaatcacacctattaccgggtgcaactggtagttaagagagctgcagctgccgtcatccctgagcaggggggccacttcgttaagcatgtccctgactcgcatgttttccctgaccaaatccgccagaaggcgctcgccgcccagcgatagcagttcttgcaaggaagcaaagtttttcaacggtttgagaccgtccgccgtaggcatgcttttgagcgtttgaccaagcagttccaggcggtcccacagctcggtcacctgctctacggcatctcgatccagcatatctcctcgtttcgcgggttggggcggctttcgctgtacggcagtagtcggtgctcgtccagacgggccagggtcatgtctttccacgggcgcagggtcctcgtcagcgtagtctgggtcacggtgaaggggtgcgctccgggctgcgcgctggccagggtgcgcttgaggctggtcctgctggtgctgaagcgctgccggtcttcgccctgcgcgtcggccaggtagcatttgaccatggtgtcatagtccagcccctccgcggcgtggcccttggcgcgcagcttgcccttggaggaggcgccgcacgaggggcagtgcagacttttgagggcgtagagcttgggcgcgagaaataccgattccggggagtaggcatccgcgccgcaggccccgcagacggtctcgcattccacgagccaggtgagctctggccgttcggggtcaaaaaccaggtttcccccatgctttttgatgcgtttcttacctctggtttccatgagccggtgtccacgctcggtgacgaaaaggctgtccgtgtccccgtatacagacttgagaggcctgtcctcgagcggtgttccgcggtcctcctcgtatagaaactcggaccactctgagacaaaggctcgcgtccaggccagcacgaaggaggctaagtgggaggggtagcggtcgttgtccactagggggtccactcgctccagggtgtgaagacacatgtcgccctcttcggcatcaaggaaggtgattggtttgtaggtgtaggccacgtgaccgggtgttcctgaaggggggctataaaagggggtgggggcgcgttcgtcctcactctcttccgcatcgctgtctgcgagggccagctgttggggtgagtactccctctgaaaagcgggcatgacttctgcgctaagattgtcagtttccaaaaacgaggaggatttgatattcacctggcccgcggtgatgcctttgagggtggccgcatccatctggtcagaaaagacaatctttttgttgtcaagcttggtggcaaacgacccgtagagggcgttggacagcaacttggcgatggagcgcagggtttggtttttgtcgcgatcggcgcgctccttggccgcgatgtttagctgcacgtattcgcgcgcaacgcaccgccattcgggaaagacggtggtgcgctcgtcgggcaccaggtgcacgcgccaaccgcggttgtgcagggtgacaaggtcaacgctggtggctacctctccgcgtaggcgctcgttggtccagcagaggcggccgcccttgcgcgagcagaatggcggtagggggtctagctgcgtctcgtccggggggtctgcgtccacggtaaagaccccgggcagcaggcgcgcgtcgaagtagtctatcttgcatccttgcaagtctagcgcctgctgccatgcgcgggcggcaagcgcgcgctcgtatgggttgagtgggggaccccatggcatggggtgggtgagcgcggaggcgtacatgccgcaaatgtcgtaaacgtagaggggctctctgagtattccaagatatgtagggtagcatcttccaccgcggatgctggcgcgcacgtaatcgtatagttcgtgcgagggagcgaggaggtcgggaccgaggttgctacgggcgggctgctctgctcggaagactatctgcctgaagatggcatgtgagttggatgatatggttggacgctggaagacgttgaagctggcgtctgtgagacctaccgcgtcacgcacgaaggaggcgtaggagtcgcgcagcttgttgaccagctcggcggtgacctgcacgtctagggcgcagtagtccagggtttccttgatgatgtcatacttatcctgtcccttttttttccacagctcgcggttgaggacaaactcttcgcggtctttccagtactcttggatcggaaacccgtcggcctccgaacggtaagagcctagcatgtagaactggttgacggcctggtaggcgcagcatcccttttctacgggtagcgcgtatgcctgcgcggccttccggagcgaggtgtgggtgagcgcaaaggtgtccctgaccatgactttgaggtactggtatttgaagtcagtgtcgtcgcatccgccctgctcccagagcaaaaagtccgtgcgctttttggaacgcggatttggcagggcgaaggtgacatcgttgaagagtatctttcccgcgcgaggcataaagttgcgtgtgatgcggaagggtcccggcacctcggaacggttgttaattacctgggcggcgagcacgatctcgtcaaagccgttgatgttgtggcccacaatgtaaagttccaagaagcgcgggatgcccttgatggaaggcaattttttaagttcctcgtaggtgagctcttcaggggagctgagcccgtgctctgaaagggcccagtctgcaagatgagggttggaagcgacgaatgagctccacaggtcacgggccattagcatttgcaggtggtcgcgaaaggtcctaaactggcgacctatggccattttttctggggtgatgcagtagaaggtaagcgggtcttgttcccagcggtcccatccaaggttcgcggctaggtctcgcgcggcagtcactagaggctcatctccgccgaacttcatgaccagcatgaagggcacgagctgcttcccaaaggcccccatccaagtataggtctctacatcgtaggtgacaaagagacgctcggtgcgaggatgcgagccgatcgggaagaactggatctcccgccaccaattggaggagtggctattgatgtggtgaaagtagaagtccctgcgacgggccgaacactcgtgctggcttttgtaaaaacgtgcgcagtactggcagcggtgcacgggctgtacatcctgcacgaggttgacctgacgaccgcgcacaaggaagcagagtgggaatttgagcccctcgcctggcgggtttggctggtggtcttctacttcggctgcttgtccttgaccgtctggctgctcgaggggagttacggtggatcggaccaccacgccgcgcgagcccaaagtccagatgtccgcgcgcggcggtcggagcttgatgacaacatcgcgcagatgggagctgtccatggtctggagctcccgcggcgtcaggtcaggcgggagctcctgcaggtttacctcgcatagacgggtcagggcgcgggctagatccaggtgatacctaatttccaggggctggttggtggcggcgtcgatggcttgcaagaggccgcatccccgcggcgcgactacggtaccgcgcggcgggcggtgggccgcgggggtgtccttggatgatgcatctaaaagcggtgacgcgggcgagcccccggaggtagggggggctccggacccgccgggagagggggcaggggcacgtcggcgccgcgcgcgggcaggagctggtgctgcgcgcgtaggttgctggcgaacgcgacgacgcggcggttgatctcctgaatctggcgcctctgcgtgaagacgacgggcccggtgagcttgagcctgaaagagagttcgacagaatcaatttcggtgtcgttgacggcggcctggcgcaaaatctcctgcacgtctcctgagttgtcttgataggcgatctcggccatgaactgctcgatctcttcctcctggagatctccgcgtccggctcgctccacggtggcggcgaggtcgttggaaatgcgggccatgagctgcgagaaggcgttgaggcctccctcgttccagacgcggctgtagaccacgcccccttcggcatcgcgggcgcgcatgaccacctgcgcgagattgagctccacgtgccgggcgaagacggcgtagtttcgcaggcgctgaaagaggtagttgagggtggtggcggtgtgttctgccacgaagaagtacataacccagcgtcgcaacgtggattcgttgatatcccccaaggcctcaaggcgctccatggcctcgtagaagtccacggcgaagttgaaaaactgggagttgcgcgccgacacggttaactcctcctccagaagacggatgagctcggcgacagtgtcgcgcacctcgcgctcaaaggctacaggggcctcttcttcttcttcaatctcctcttccataagggcctccccttcttcttcttctggcggcggtgggggaggggggacacggcggcgacgacggcgcaccgggaggcggtcgacaaagcgctcgatcatctccccgcggcgacggcgcatggtctcggtgacggcgcggccgttctcgcgggggcgcagttggaagacgccgcccgtcatgtcccggttatgggttggcggggggctgccatgcggcagggatacggcgctaacgatgcatctcaacaattgttgtgtaggtactccgccgccgagggacctgagcgagtccgcatcgaccggatcggaaaacctctcgagaaaggcgtctaaccagtcacagtcgcaaggtaggctgagcaccgtggcgggcggcagcgggcggcggtcggggttgtttctggcggaggtgctgctgatgatgtaattaaagtaggcggtcttgagacggcggatggtcgacagaagcaccatgtccttgggtccggcctgctgaatgcgcaggcggtcggccatgccccaggcttcgttttgacatcggcgcaggtctttgtagtagtcttgcatgagcctttctaccggcacttcttcttctccttcctcttgtcctgcatctcttgcatctatcgctgcggcggcggcggagtttggccgtaggtggcgccctcttcctcccatgcgtgtgaccccgaagcccctcatcggctgaagcagggctaggtcggcgacaacgcgctcggctaatatggcctgctgcacctgcgtgagggtagactggaagtcatccatgtccacaaagcggtggtatgcgcccgtgttgatggtgtaagtgcagttggccataacggaccagttaacggtctggtgacccggctgcgagagctcggtgtacctgagacgcgagtaagccctcgagtcaaatacgtagtcgttgcaagtccgcaccaggtactggtatcccaccaaaaagtgcggcggcggctggcggtagaggggccagcgtagggtggccggggctccgggggcgagatcttccaacataaggcgatgatatccgtagatgtacctggacatccaggtgatgccggcggcggtggtggaggcgcgcggaaagtcgcggacgcggttccagatgttgcgcagcggcaaaaagtgctccatggtcgggacgctctggccggtcaggcgcgcgcaatcgttgacgctctagaccgtgcaaaaggagagcctgtaagcgggcactcttccgtggtctggtggataaattcgcaagggtatcatggcggacgaccggggttcgagccccgtatccggccgtccgccgtgatccatgcggttaccgcccgcgtgtcgaacccaggtgtgcgacgtcagacaacgggggagtgctccttttggcttccttccaggcgcggcggctgctgcgctagcttttttggccactggccgcgcgcagcgtaagcggttaggctggaaagcgaaagcattaagtggctcgctccctgtagccggagggttattttccaagggttgagtcgcgggacccccggttcgagtctcggaccggccggactgcggcgaacgggggtttgcctccccgtcatgcaagaccccgcttgcaaattcctccggaaacagggacgagccccttttttgcttttcccagatgcatccggtgctgcggcagatgcgcccccctcctcagcagcggcaagagcaagagcagcggcagacatgcagggcaccctcccctcctcctaccgcgtcaggaggggcgacatccgcggttgacgcggcagcagatggtgattacgaacccccgcggcgccgggcccggcactacctggacttggaggagggcgagggcctggcgcggctaggagcgccctctcctgagcggtacccaagggtgcagctgaagcgtgatacgcgtgaggcgtacgtgccgcggcagaacctgtttcgcgaccgcgagggagaggagcccgaggagatgcgggatcgaaagttccacgcagggcgcgagctgcggcatggcctgaatcgcgagcggttgctgcgcgaggaggactttgagcccgacgcgcgaaccgggattagtcccgcgcgcgcacacgtggcggccgccgacctggtaaccgcatacgagcagacggtgaaccaggagattaactttcaaaaaagctttaacaaccacgtgcgtacgcttgtggcgcgcgaggaggtggctataggactgatgcatctgtgggactttgtaagcgcgctggagcaaaacccaaatagcaagccgctcatggcgcagctgttccttatagtgcagcacagcagggacaacgaggcattcagggatgcgctgctaaacatagtagagcccgagggccgctggctgctcgatttgataaacatcctgcagagcatagtggtgcaggagcgcagcttgagcctggctgacaaggtggccgccatcaactattccatgcttagcctgggcaagttttacgcccgcaagatataccataccccttacgttcccatagacaaggaggtaaagatcgaggggttctacatgcgcatggcgctgaaggtgcttaccttgagcgacgacctgggcgtttatcgcaacgagcgcatccacaaggccgtgagcgtgagccggcggcgcgagctcagcgaccgcgagctgatgcacagcctgcaaagggccctggctggcacgggcagcggcgatagagaggccgagtcctactttgacgcgggcgctgacctgcgctgggccccaagccgacgcgccctggaggcagctggggccggacctgggctggcggtggcacccgcgcgcgctggcaacgtcggcggcgtggaggaatatgacgaggacgatgagtacgagccagaggacggcgagtactaagcggtgatgtttctgatcagatgatgcaagacgcaacggacccggcggtgcgggcggcgctgcagagccagccgtccggccttaactccacggacgactggcgccaggtcatggaccgcatcatgtcgctgactgcgcgcaatcctgacgcgttccggcagcagccgcaggccaaccggctctccgcaattctggaagcggtggtcccggcgcgcgcaaaccccacgcacgagaaggtgctggcgatcgtaaacgcgctggccgaaaacagggccatccggcccgacgaggccggcctggtctacgacgcgctgcttcagcgcgtggctcgttacaacagcggcaacgtgcagaccaacctggaccggctggtgggggatgtgcgcgaggccgtggcgcagcgtgagcgcgcgcagcagcagggcaacctgggctccatggttgcactaaacgccttcctgagtacacagcccgccaacgtgccgcggggacaggaggactacaccaactttgtgagcgcactgcggctaatggtgactgagacaccgcaaagtgaggtgtaccagtctgggccagactattttttccagaccagtagacaaggcctgcagaccgtaaacctgagccaggctttcaaaaacttgcaggggctgtggggggtgcgggctcccacaggcgaccgcgcgaccgtgtctagcttgctgacgcccaactcgcgcctgttgctgctgctaatagcgcccttcacggacagtggcagcgtgtcccgggacacatacctaggtcacttgctgacactgtaccgcgaggccataggtcaggcgcatgtggacgagcatactttccaggagattacaagtgtcagccgcgcgctggggcaggaggacacgggcagcctggaggcaaccctaaactacctgctgaccaaccggcggcagaagatcccctcgttgcacagtttaaacagcgaggaggagcgcattttgcgctacgtgcagcagagcgtgagccttaacctgatgcgcgacggggtaacgcccagcgtggcgctggacatgaccgcgcgcaacatggaaccgggcatgtatgcctcaaaccggccgtttatcaaccgcctaatggactacttgcatcgcgcggccgccgtgaaccccgagtatttcaccaatgccatcttgaacccgcactggctaccgccccctggtttctacaccgggggattcgaggtgcccgagggtaacgatggattcctctgggacgacatagacgacagcgtgttttccccgcaaccgcagaccctgctagagttgcaacagcgcgagcaggcagaggcggcgctgcgaaaggaaagcttccgcaggccaagcagcttgtccgatctaggcgctgcggccccgcggtcagatgctagtagcccatttccaagcttgatagggtctcttaccagcactcgcaccacccgcccgcgcctgctgggcgaggaggagtacctaaacaactcgctgctgcagccgcagcgcgaaaaaaacctgcctccggcatttcccaacaacgggatagagagcctagtggacaagatgagtagatggaagacgtacgcgcaggagcacagggacgtgccaggcccgcgcccgcccacccgtcgtcaaaggcacgaccgtcagcggggtctggtgtgggaggacgatgactcggcagacgacagcagcgtcctggatttgggagggagtggcaacccgtttgcgcaccttcgccccaggctggggagaatgttttaaaaaaaaaaaagcatgatgcaaaataaaaaactcaccaaggccatggcaccgagcgttggttttcttgtattccccttagtatgcggcgcgcggcgatgtatgaggaaggtcctcctccctcctacgagagtgtggtgagcgcggcgccagtggcggcggcgctgggttctcccttcgatgctcccctggacccgccgtttgtgcctccgcggtacctgcggcctaccggggggagaaacagcatccgttactctgagttggcacccctattcgacaccacccgtgtgtacctggtggacaacaagtcaacggatgtggcatccctgaactaccagaacgaccacagcaactttctgaccacggtcattcaaaacaatgactacagcccgggggaggcaagcacacagaccatcaatcttgacgaccggtcgcactggggcggcgacctgaaaaccatcctgcataccaacatgccaaatgtgaacgagttcatgtttaccaataagtttaaggcgcgggtgatggtgtcgcgcttgcctactaaggacaatcaggtggagctgaaatacgagtgggtggagttcacgctgcccgagggcaactactccgagaccatgaccatagaccttatgaacaacgcgatcgtggagcactacttgaaagtgggcagacagaacggggttctggaaagcgacatcggggtaaagtttgacacccgcaacttcagactggggtttgaccccgtcactggtcttgtcatgcctggggtatatacaaacgaagccttccatccagacatcattttgctgccaggatgcggggtggacttcacccacagccgcctgagcaacttgttgggcatccgcaagcggcaacccttccaggagggctttaggatcacctacgatgatctggagggtggtaacattcccgcactgttggatgtggacgcctaccaggcgagcttgaaagatgacaccgaacagggcgggggtggcgcaggcggcagcaacagcagtggcagcggcgcggaagagaactccaacgcggcagccgcggcaatgcagccggtggaggacatgaacgatcatgccattcgcggcgacacctttgccacacgggctgaggagaagcgcgctgaggccgaagcagcggccgaagctgccgcccccgctgcgcaacccgaggtcgagaagcctcagaagaaaccggtgatcaaacccctgacagaggacagcaagaaacgcagttacaacctaataagcaatgacagcaccttcacccagtaccgcagctggtaccttgcatacaactacggcgaccctcagaccggaatccgctcatggaccctgctttgcactcctgacgtaacctgcggctcggagcaggtctactggtcgttgccagacatgatgcaagaccccgtgaccttccgctccacgcgccagatcagcaactttccggtggtgggcgccgagctgttgcccgtgcactccaagagcttctacaacgaccaggccgtctactcccaactcatccgccagtttacctctctgacccacgtgttcaatcgctttcccgagaaccagattttggcgcgcccgccagcccccaccatcaccaccgtcagtgaaaacgttcctgctctcacagatcacgggacgctaccgctgcgcaacagcatcggaggagtccagcgagtgaccattactgacgccagacgccgcacctgcccctacgtttacaaggccctgggcatagtctcgccgcgcgtcctatcgagccgcactttttgagcaagcatgtccatccttatatcgcccagcaataacacaggctggggcctgcgcttcccaagcaagatgtttggcggggccaagaagcgctccgaccaacacccagtgcgcgtgcgcgggcactaccgcgcgccctggggcgcgcacaaacgcggccgcactgggcgcaccaccgtcgatgacgccatcgacgcggtggtggaggaggcgcgcaactacacgcccacgccgccaccagtgtccacagtggacgcggccattcagaccgtggtgcgcggagcccggcgctatgctaaaatgaagagacggcggaggcgcgtagcacgtcgccaccgccgccgacccggcactgccgcccaacgcgcggcggcggccctgcttaaccgcgcacgtcgcaccggccgacgggcggccatgcgggccgctcgaaggctggccgcgggtattgtcactgtgccccccaggtccaggcgacgagcggccgccgcagcagccgcggccattagtgctatgactcagggtcgcaggggcaacgtgtattgggtgcgcgactcggttagcggcctgcgcgtgcccgtgcgcacccgccccccgcgcaactagattgcaagaaaaaactacttagactcgtactgttgtatgtatccagcggcggcggcgcgcaacgaagctatgtccaagcgcaaaatcaaagaagagatgctccaggtcatcgcgccggagatctatggccccccgaagaaggaagagcaggattacaagccccgaaagctaaagcgggtcaaaaagaaaaagaaagatgatgatgatgaacttgacgacgaggtggaactgctgcacgctaccgcgcccaggcgacgggtacagtggaaaggtcgacgcgtaaaacgtgttttgcgacccggcaccaccgtagtctttacgcccggtgagcgctccacccgcacctacaagcgcgtgtatgatgaggtgtacggcgacgaggacctgcttgagcaggccaacgagcgcctcggggagtttgcctacggaaagcggcataaggacatgctggcgttgccgctggacgagggcaacccaacacctagcctaaagcccgtaacactgcagcaggtgctgcccgcgcttgcaccgtccgaagaaaagcgcggcctaaagcgcgagtctggtgacttggcacccaccgtgcagctgatggtacccaagcgccagcgactggaagatgtcttggaaaaaatgaccgtggaacctgggctggagcccgaggtccgcgtgcggccaatcaagcaggtggcgccgggactgggcgtgcagaccgtggacgttcagatacccactaccagtagcaccagtattgccaccgccacagagggcatggagacacaaacgtccccggttgcctcagcggtggcggatgccgcggtgcaggcggtcgctgcggccgcgtccaagacctctacggaggtgcaaacggacccgtggatgtttcgcgtttcagccccccggcgcccgcgcggttcgaggaagtacggcgccgccagcgcgctactgcccgaatatgccctacatccttccattgcgcctacccccggctatcgtggctacacctaccgccccagaagacgagcaactacccgacgccgaaccaccactggaacccgccgccgccgtcgccgtcgccagcccgtgctggccccgatttccgtgcgcagggtggctcgcgaaggaggcaggaccctggtgctgccaacagcgcgctaccaccccagcatcgtttaaaagccggtctttgtggttcttgcagatatggccctcacctgccgcctccgtttcccggtgccgggattccgaggaagaatgcaccgtaggaggggcatggccggccacggcctgacgggcggcatgcgtcgtgcgcaccaccggcggcggcgcgcgtcgcaccgtcgcatgcgcggcggtatcctgcccctccttattccactgatcgccgcggcgattggcgccgtgcccggaattgcatccgtggccttgcaggcgcagagacactgattaaaaacaagttgcatgtggaaaaatcaaaataaaaagtctggactctcacgctcgcttggtcctgtaactattttgtagaatggaagacatcaactttgcgtctctggccccgcgacacggctcgcgcccgttcatgggaaactggcaagatatcggcaccagcaatatgagcggtggcgccttcagctggggctcgctgtggagcggcattaaaaatttcggttccaccgttaagaactatggcagcaaggcctggaacagcagcacaggccagatgctgagggataagttgaaagagcaaaatttccaacaaaaggtggtagatggcctggcctctggcattagcggggtggtggacctggccaaccaggcagtgcaaaataagattaacagtaagcttgatccccgccctcccgtagaggagcctccaccggccgtggagacagtgtctccagaggggcgtggcgaaaagcgtccgcgccccgacagggaagaaactctggtgacgcaaatagacgagcctccctcgtacgaggaggcactaaagcaaggcctgcccaccacccgtcccatcgcgcccatggctaccggagtgctgggccagcacacacccgtaacgctggacctgcctccccccgccgacacccagcagaaacctgtgctgccaggcccgaccgccgttgttgtaacccgtcctagccgcgcgtccctgcgccgcgccgccagcggtccgcgatcgttgcggcccgtagccagtggcaactggcaaagcacactgaacagcatcgtgggtctgggggtgcaatccctgaagcgccgacgatgcttctgaatagctaacgtgtcgtatgtgtgtcatgtatgcgtccatgtcgccgccagaggagctgctgagccgccgcgcgcccgctttccaagatggctaccccttcgatgatgccgcagtggtcttacatgcacatctcgggccaggacgcctcggagtacctgagccccgggctggtgcagtttgcccgcgccaccgagacgtacttcagcctgaataacaagtttagaaaccccacggtggcgcctacgcacgacgtgaccacagaccggtcccagcgtttgacgctgcggttcatccctgtggaccgtgaggatactgcgtactcgtacaaggcgcggttcaccctagctgtgggtgataaccgtgtgctggacatggcttccacgtactttgacatccgcggcgtgctggacaggggccctacttttaagccctactctggcactgcctacaacgccctggctcccaagggtgccccaaatccttgcgaatgggatgaagctgctactgctcttgaaataaacctagaagaagaggacgatgacaacgaagacgaagtagacgagcaagctgagcagcaaaaaactcacgtatttgggcaggcgccttattctggtataaatattacaaaggagggtattcaaataggtgtcgaaggtcaaacacctaaatatgccgataaaacatttcaacctgaacctcaaataggagaatctcagtggtacgaaactgaaattaatcatgcagctgggagagtccttaaaaagactaccccaatgaaaccatgttacggttcatatgcaaaacccacaaatgaaaatggagggcaaggcattcttgtaaagcaacaaaatggaaagctagaaagtcaagtggaaatgcaatttttctcaactactgaggcgaccgcaggcaatggtgataacttgactcctaaagtggtattgtacagtgaagatgtagatatagaaaccccagacactcatatttcttacatgcccactattaaggaaggtaactcacgagaactaatgggccaacaatctatgcccaacaggcctaattacattgcttttagggacaattttattggtctaatgtattacaacagcacgggtaatatgggtgttctggcgggccaagcatcgcagttgaatgctgttgtagatttgcaagacagaaacacagagctttcataccagcttttgcttgattccattggtgatagaaccaggtacttttctatgtggaatcaggctgttgacagctatgatccagatgttagaattattgaaaatcatggaactgaagatgaacttccaaattactgctttccactgggaggtgtgattaatacagagactcttaccaaggtaaaacctaaaacaggtcaggaaaatggatgggaaaaagatgctacagaattttcagataaaaatgaaataagagttggaaataattttgccatggaaatcaatctaaatgccaacctgtggagaaatttcctgtactccaacatagcgctgtatttgcccgacaagctaaagtacagtccttccaacgtaaaaatttctgataacccaaacacctacgactacatgaacaagcgagtggtggctcccgggttagtggactgctacattaaccttggagcacgctggtcccttgactatatggacaacgtcaacccatttaaccaccaccgcaatgctggcctgcgctaccgctcaatgttgctgggcaatggtcgctatgtgcccttccacatccaggtgcctcagaagttctttgccattaaaaacctccttctcctgccgggctcatacacctacgagtggaacttcaggaaggatgttaacatggttctgcagagctccctaggaaatgacctaagggttgacggagccagcattaagtttgatagcatttgcctttacgccaccttcttccccatggcccacaacaccgcctccacgcttgaggccatgcttagaaacgacaccaacgaccagtcctttaacgactatctctccgccgccaacatgctctaccctatacccgccaacgctaccaacgtgcccatatccatcccctcccgcaactgggcggctttccgcggctgggccttcacgcgccttaagactaaggaaaccccatcactgggctcgggctacgacccttattacacctactctggctctataccctacctagatggaaccttttacctcaaccacacctttaagaaggtggccattacctttgactcttctgtcagctggcctggcaatgaccgcctgcttacccccaacgagtttgaaattaagcgctcagttgacggggagggttacaacgttgcccagtgtaacatgaccaaagactggttcctggtacaaatgctagctaactacaacattggctaccagggcttctatatcccagagagctacaaggaccgcatgtactccttctttagaaacttccagcccatgagccgtcaggtggtggatgatactaaatacaaggactaccaacaggtgggcatcctacaccaacacaacaactctggatttgttggctaccttgcccccaccatgcgcgaaggacaggcctaccctgctaacttcccctatccgcttataggcaagaccgcagttgacagcattacccagaaaaagtttctttgcgatcgcaccctttggcgcatcccattctccagtaactttatgtccatgggcgcactcacagacctgggccaaaaccttctctacgccaactccgcccacgcgctagacatgacttttgaggtggatcccatggacgagcccacccttctttatgttttgtttgaagtctttgacgtggtccgtgtgcaccggccgcaccgcggcgtcatcgaaaccgtgtacctgcgcacgcccttctcggccggcaacgccacaacataaagaagcaagcaacatcaacaacagctgccgccatgggctccagtgagcaggaactgaaagccattgtcaaagatcttggttgtgggccatattttttgggcacctatgacaagcgctttccaggctttgtttctccacacaagctcgcctgcgccatagtcaatacggccggtcgcgagactgggggcgtacactggatggcctttgcctggaacccgcactcaaaaacatgctacctctttgagccctttggcttttctgaccagcgactcaagcaggtttaccagtttgagtacgagtcactcctgcgccgtagcgccattgcttcttcccccgaccgctgtataacgctggaaaagtccacccaaagcgtacaggggcccaactcggccgcctgtggactattctgctgcatgtttctccacgcctttgccaactggccccaaactcccatggatcacaaccccaccatgaaccttattaccggggtacccaactccatgctcaacagtccccaggtacagcccaccctgcgtcgcaaccaggaacagctctacagcttcctggagcgccactcgccctacttccgcagccacagtgcgcagattaggagcgccacttctttttgtcacttgaaaaacatgtaaaaataatgtactagagacactttcaataaaggcaaatgcttttatttgtacactctcgggtgattatttacccccacccttgccgtctgcgccgtttaaaaatcaaaggggttctgccgcgcatcgctatgcgccactggcagggacacgttgcgatactggtgtttagtgctccacttaaactcaggcacaaccatccgcggcagctcggtgaagttttcactccacaggctgcgcaccatcaccaacgcgtttagcaggtcgggcgccgatatcttgaagtcgcagttggggcctccgccctgcgcgcgcgagttgcgatacacagggttgcagcactggaacactatcagcgccgggtggtgcacgctggccagcacgctcttgtcggagatcagatccgcgtccaggtcctccgcgttgctcagggcgaacggagtcaactttggtagctgccttcccaaaaagggcgcgtgcccaggctttgagttgcactcgcaccgtagtggcatcaaaaggtgaccgtgcccggtctgggcgttaggatacagcgcctgcataaaagccttgatctgcttaaaagccacctgagcctttgcgccttcagagaagaacatgccgcaagacttgccggaaaactgattggccggacaggccgcgtcgtgcacgcagcaccttgcgtcggtgttggagatctgcaccacatttcggccccaccggttcttcacgatcttggccttgctagactgctccttcagcgcgcgctgcccgttttcgctcgtcacatccatttcaatcacgtgctccttatttatcataatgcttccgtgtagacacttaagctcgccttcgatctcagcgcagcggtgcagccacaacgcgcagcccgtgggctcgtgatgcttgtaggtcacctctgcaaacgactgcaggtacgcctgcaggaatcgccccatcatcgtcacaaaggtcttgttgctggtgaaggtcagctgcaacccgcggtgctcctcgttcagccaggtcttgcatacggccgccagagcttccacttggtcaggcagtagtttgaagttcgcctttagatcgttatccacgtggtacttgtccatcagcgcgcgcgcagcctccatgcccttctcccacgcagacacgatcggcacactcagcgggttcatcaccgtaatttcactttccgcttcgctgggctcttcctcttcctcttgcgtccgcataccacgcgccactgggtcgtcttcattcagccgccgcactgtgcgcttacctcctttgccatgcttgattagcaccggtgggttgctgaaacccaccatttgtagcgccacatcttctctttcttcctcgctgtccacgattacctctggtgatggcgggcgctcgggcttgggagaagggcgcttctttttcttcttgggcgcaatggccaaatccgccgccgaggtcgatggccgcgggctgggtgtgcgcggcaccagcgcgtcttgtgatgagtcttcctcgtcctcggactcgatacgccgcctcatccgcttttttgggggcgcccggggaggcggcggcgacggggacggggacgacacgtcctccatggttgggggacgtcgcgccgcaccgcgtccgcgctcgggggtggtttcgcgctgctcctcttcccgactggccatttccttctcctataggcagaaaaagatcatggagtcagtcgagaagaaggacagcctaaccgccccctctgagttcgccaccaccgcctccaccgatgccgccaacgcgcctaccaccttccccgtcgaggcacccccgcttgaggaggaggaagtgattatcgagcaggacccaggttttgtaagcgaagacgacgaggaccgctcagtaccaacagaggataaaaagcaagaccaggacaacgcagaggcaaacgaggaacaagtcgggcggggggacgaaaggcatggcgactacctagatgtgggagacgacgtgctgttgaagcatctgcagcgccagtgcgccattatctgcgacgcgttgcaagagcgcagcgatgtgcccctcgccatagcggatgtcagccttgcctacgaacgccacctattctcaccgcgcgtaccccccaaacgccaagaaaacggcacatgcgagcccaacccgcgcctcaacttctaccccgtatttgccgtgccagaggtgcttgccacctatcacatctttttccaaaactgcaagatacccctatcctgccgtgccaaccgcagccgagcggacaagcagctggccttgcggcagggcgctgtcatacctgatatcgcctcgctcaacgaagtgccaaaaatctttgagggtcttggacgcgacgagaagcgcgcggcaaacgctctgcaacaggaaaacagcgaaaatgaaagtcactctggagtgttggtggaactcgagggtgacaacgcgcgcctagccgtactaaaacgcagcatcgaggtcacccactttgcctacccggcacttaacctaccccccaaggtcatgagcacagtcatgagtgagctgatcgtgcgccgtgcgcagcccctggagagggatgcaaatttgcaagaacaaacagaggagggcctacccgcagttggcgacgagcagctagcgcgctggcttcaaacgcgcgagcctgccgacttggaggagcgacgcaaactaatgatggccgcagtgctcgttaccgtggagcttgagtgcatgcagcggttctttgctgacccggagatgcagcgcaagctagaggaaacattgcactacacctttcgacagggctacgtacgccaggcctgcaagatctccaacgtggagctctgcaacctggtctcctaccttggaattttgcacgaaaaccgccttgggcaaaacgtgcttcattccacgctcaagggcgaggcgcgccgcgactacgtccgcgactgcgtttacttatttctatgctacacctggcagacggccatgggcgtttggcagcagtgcttggaggagtgcaacctcaaggagctgcagaaactgctaaagcaaaacttgaaggacctatggacggccttcaacgagcgctccgtggccgcgcacctggcggacatcattttccccgaacgcctgcttaaaaccctgcaacagggtctgccagacttcaccagtcaaagcatgttgcagaactttaggaactttatcctagagcgctcaggaatcttgcccgccacctgctgtgcacttcctagcgactttgtgcccattaagtaccgcgaatgccctccgccgctttggggccactgctaccttctgcagctagccaactaccttgcctaccactctgacataatggaagacgtgagcggtgacggtctactggagtgtcactgtcgctgcaacctatgcaccccgcaccgctccctggtttgcaattcgcagctgcttaacgaaagtcaaattatcggtacctttgagctgcagggtccctcgcctgacgaaaagtccgcggctccggggttgaaactcactccggggctgtggacgtcggcttaccttcgcaaatttgtacctgaggactaccacgcccacgagattaggttctacgaagaccaatcccgcccgccaaatgcggagcttaccgcctgcgtcattacccagggccacattcttggccaattgcaagccatcaacaaagcccgccaagagtttctgctacgaaagggacggggggtttacttggacccccagtccggcgaggagctcaacccaatccccccgccgccgcagccctatcagcagcagccgcgggcccttgcttcccaggatggcacccaaaaagaagctgcagctgccgccgccacccacggacgaggaggaatactgggacagtcaggcagaggaggttttggacgaggaggaggaggacatgatggaagactgggagagcctagacgaggaagcttccgaggtcgaagaggtgtcagacgaaacaccgtcaccctcggtcgcattcccctcgccggcgccccagaaatcggcaaccggttccagcatggctacaacctccgctcctcaggcgccgccggcactgcccgttcgccgacccaaccgtagatgggacaccactggaaccagggccggtaagtccaagcagccgccgccgttagcccaagagcaacaacagcgccaaggctaccgctcatggcgcgggcacaagaacgccatagttgcttgcttgcaagactgtgggggcaacatctccttcgcccgccgctttcttctctaccatcacggcgtggccttcccccgtaacatcctgcattactaccgtcatctctacagcccatactgcaccggcggcagcggcagcggcagcaacagcagcggccacacagaagcaaaggcgaccggatagcaagactctgacaaagcccaagaaatccacagcggcggcagcagcaggaggaggagcgctgcgtctggcgcccaacgaacccgtatcgacccgcgagcttagaaacaggatttttcccactctgtatgctatatttcaacagagcaggggccaagaacaagagctgaaaataaaaaacaggtctctgcgatccctcacccgcagctgcctgtatcacaaaagcgaagatcagcttcggcgcacgctggaagacgcggaggctctcttcagtaaatactgcgcgctgactcttaaggactagtttcgcgccctttctcaaatttaagcgcgaaaactacgtcatctccagcggccacacccggcgccagcacctgtcgtcagcgccattatgagcaaggaaattcccacgccctacatgtggagttaccagccacaaatgggacttgcggctggagctgcccaagactactcaacccgaataaactacatgagcgcgggaccccacatgatatcccgggtcaacggaatccgcgcccaccgaaaccgaattctcttggaacaggcggctattaccaccacacctcgtaataaccttaatccccgtagttggcccgctgccctggtgtaccaggaaagtcccgctcccaccactgtggtacttcccagagacgcccaggccgaagttcagatgactaactcaggggcgcagcttgcgggcggctttcgtcacagggtgcggtcgcccgggcagggtataactcacctgacaatcagagggcgaggtattcagctcaacgacgagtcggtgagctcctcgcttggtctccgtccggacgggacatttcagatcggcggcgccggccgtccttcattcacgcctcgtcaggcaatcctaactctgcagacctcgtcctctgagccgcgctctggaggcattggaactctgcaatttattgaggagtttgtgccatcggtctactttaaccccttctcgggacctcccggccactatccggatcaatttattcctaactttgacgcggtaaaggactcggcggacggctacgactgaatgttaagtggagaggcagagcaactgcgcctgaaacacctggtccactgtcgccgccacaagtgctttgcccgcgactccggtgagttttgctactttgaattgcccgaggatcatatcgagggcccggcgcacggcgtccggcttaccgcccagggagagcttgcccgtagcctgattcgggagtttacccagcgccccctgctagttgagcgggacaggggaccctgtgttctcactgtgatttgcaactgtcctaaccttggattacatcaagatctttgttgccatctctgtgctgagtataataaatacagaaattaaaatatactggggctcctatcgccatcctgtaaacgccaccgtcttcacccgcccaagcaaaccaaggcgaaccttacctggtacttttaacatctctccctctgtgatttacaacagtttcaacccagacggagtgagtctacgagagaacctctccgagctcagctactccatcagaaaaaacaccaccctccttacctgccgggaacgtacgagtgcgtcaccggccgctgcaccacacctaccgcctgaccgtaaaccagactttttccggacagacctcaataactctgtttaccagaacaggaggtgagcttagaaaacccttagggtattaggccaaaggcgcagctactgtggggtttatgaacaattcaagcaactctacgggctattctaattcaggtttctctagaaatggacggaattattacagagcagcgcctgctagaaagacgcagggcagcggccgagcaacagcgcatgaatcaagagctccaagacatggttaacttgcaccagtgcaaaaggggtatcttttgtctggtaaagcaggccaaagtcacctacgacagtaataccaccggacaccgccttagctacaagttgccaaccaagcgtcagaaattggtggtcatggtgggagaaaagcccattaccataactcagcactcggtagaaaccgaaggctgcattcactcaccttgtcaaggacctgaggatctctgcacccttattaagaccctgtgcggtctcaaagatcttattccctttaactaataaaaaaaaataataaagcatcacttacttaaaatcagttagcaaatttctgtccagtttattcagcagcacctccttgccctcctcccagctctggtattgcagcttcctcctggctgcaaactttctccacaatctaaatggaatgtcagtttcctcctgttcctgtccatccgcacccactatcttcatgttgttgcagatgaagcgcgcaagaccgtctgaagataccttcaaccccgtgtatccatatgacacggaaaccggtcctccaactgtgccttttcttactcctccctttgtatcccccaatgggtttcaagagagtccccctggggtactctctttgcgcctatccgaacctctagttacctccaatggcatgcttgcgctcaaaatgggcaacggcctctctctggacgaggccggcaaccttacctcccaaaatgtaaccactgtgagcccacctctcaaaaaaaccaagtcaaacataaacctggaaatatctgcacccctcacagttacctcagaagccctaactgtggctgccgccgcacctctaatggtcgcgggcaacacactcaccatgcaatcacaggccccgctaaccgtgcacgactccaaacttagcattgccacccaaggacccctcacagtgtcagaaggaaagctagccctgcaaacatcaggccccctcaccaccaccgatagcagtacccttactatcactgcctcaccccctctaactactgccactggtagcttgggcattgacttgaaagagcccatttatacacaaaatggaaaactaggactaaagtacggggctcctttgcatgtaacagacgacctaaacactttgaccgtagcaactggtccaggtgtgactattaataatacttccttgcaaactaaagttactggagccttgggttttgattcacaaggcaatatgcaacttaatgtagcaggaggactaaggattgattctcaaaacagacgccttatacttgatgttagttatccgtttgatgctcaaaaccaactaaatctaagactaggacagggccctctttttataaactcagcccacaacttggatattaactacaacaaaggcctttacttgtttacagcttcaaacaattccaaaaagcttgaggttaacctaagcactgccaaggggttgatgtttgacgctacagccatagccattaatgcaggagatgggcttgaatttggttcacctaatgcaccaaacacaaatcccctcaaaacaaaaattggccatggcctagaatttgattcaaacaaggctatggttcctaaactaggaactggccttagttttgacagcacaggtgccattacagtaggaaacaaaaataatgataagctaactttgtggaccacaccagctccatctcctaactgtagactaaatgcagagaaagatgctaaactcactttggtcttaacaaaatgtggcagtcaaatacttgctacagtttcagttttggctgttaaaggcagtttggctccaatatctggaacagttcaaagtgctcatcttattataagatttgacgaaaatggagtgctactaaacaattccttcctggacccagaatattggaactttagaaatggagatcttactgaaggcacagcctatacaaacgctgttggatttatgcctaacctatcagcttatccaaaatctcacggtaaaactgccaaaagtaacattgtcagtcaagtttacttaaacggagacaaaactaaacctgtaacactaaccattacactaaacggtacacaggaaacaggagacacaactccaagtgcatactctatgtcattttcatgggactggtctggccacaactacattaatgaaatatttgccacatcctcttacactttttcatacattgcccaagaataaagaatcgtttgtgttatgtttcaacgtgtttatttttcaattgcagaaaatttcgaatcatttttcattcagtagtatagccccaccaccacatagcttatacagatcaccgtaccttaatcaaactcacagaaccctagtattcaacctgccacctccctcccaacacacagagtacacagtcctttctccccggctggccttaaaaagcatcatatcatgggtaacagacatattcttaggtgttatattccacacggtttcctgtcgagccaaacgctcatcagtgatattaataaactccccgggcagctcacttaagttcatgtcgctgtccagctgctgagccacaggctgctgtccaacttgcggttgcttaacgggcggcgaaggagaagtccacgcctacatgggggtagagtcataatcgtgcatcaggatagggcggtggtgctgcagcagcgcgcgaataaactgctgccgccgccgctccgtcctgcaggaatacaacatggcagtggtctcctcagcgatgattcgcaccgcccgcagcataaggcgccttgtcctccgggcacagcagcgcaccctgatctcacttaaatcagcacagtaactgcagcacagcaccacaatattgttcaaaatcccacagtgcaaggcgctgtatccaaagctcatggcggggaccacagaacccacgtggccatcataccacaagcgcaggtagattaagtggcgacccctcataaacacgctggacataaacattacctcttttggcatgttgtaattcaccacctcccggtaccatataaacctctgattaaacatggcgccatccaccaccatcctaaaccagctggccaaaacctgcccgccggctatacactgcagggaaccgggactggaacaatgacagtggagagcccaggactcgtaaccatggatcatcatgctcgtcatgatatcaatgttggcacaacacaggcacacgtgcatacacttcctcaggattacaagctcctcccgcgttagaaccatatcccagggaacaacccattcctgaatcagcgtaaatcccacactgcagggaagacctcgcacgtaactcacgttgtgcattgtcaaagtgttacattcgggcagcagcggatgatcctccagtatggtagcgcgggtttctgtctcaaaaggaggtagacgatccctactgtacggagtgcgccgagacaaccgagatcgtgttggtcgtagtgtcatgccaaatggaacgccggacgtagtcatatttcctgaagcaaaaccaggtgcgggcgtgacaaacagatctgcgtctccggtctcgccgcttagatcgctctgtgtagtagttgtagtatatccactctctcaaagcatccaggcgccccctggcttcgggttctatgtaaactccttcatgcgccgctgccctgataacatccaccaccgcagaataagccacacccagccaacctacacattcgttctgcgagtcacacacgggaggagcgggaagagctggaagaaccatgtttttttttttattccaaaagattatccaaaacctcaaaatgaagatctattaagtgaacgcgctcccctccggtggcgtggtcaaactctacagccaaagaacagataatggcatttgtaagatgttgcacaatggcttccaaaaggcaaacggccctcacgtccaagtggacgtaaaggctaaacccttcagggtgaatctcctctataaacattccagcaccttcaaccatgcccaaataattctcatctcgccaccttctcaatatatctctaagcaaatcccgaatattaagtccggccattgtaaaaatctgctccagagcgccctccaccttcagcctcaagcagcgaatcatgattgcaaaaattcaggttcctcacagacctgtataagattcaaaagcggaacattaacaaaaataccgcgatcccgtaggtcccttcgcagggccagctgaacataatcgtgcaggtctgcacggaccagcgcggccacttccccgccaggaaccttgacaaaagaacccacactgattatgacacgcatactcggagctatgctaaccagcgtagccccgatgtaagctttgttgcatgggcggcgatataaaatgcaaggtgctgctcaaaaaatcaggcaaagcctcgcgcaaaaaagaaagcacatcgtagtcatgctcatgcagataaaggcaggtaagctccggaaccaccacagaaaaagacaccatttttctctcaaacatgtctgcgggtttctgcataaacacaaaataaaataacaaaaaaacatttaaacattagaagcctgtcttacaacaggaaaaacaacccttataagcataagacggactacggccatgccggcgtgaccgtaaaaaaactggtcaccgtgattaaaaagcaccaccgacagctcctcggtcatgtccggagtcataatgtaagactcggtaaacacatcaggttgattcacatcggtcagtgctaaaaagcgaccgaaatagcccgggggaatacatacccgcaggcgtagagacaacattacagcccccataggaggtataacaaaattaataggagagaaaaacacataaacacctgaaaaaccctcctgcctaggcaaaatagcaccctcccgctccagaacaacatacagcgcttccacagcggcagccataacagtcagccttaccagtaaaaaagaaaacctattaaaaaaacaccactcgacacggcaccagctcaatcagtcacagtgtaaaaaagggccaagtgcagagcgagtatatataggactaaaaaatgacgtaacggttaaagtccacaaaaaacacccagaaaaccgcacgcgaacctacgcccagaaacgaaagccaaaaaacccacaacttcctcaaatcgtcacttccgttttcccacgttacgtcacttcccattttaagaaaactacaattcccaacacatacaagttactccgccctaaaacctacgtcacccgccccgttcccacgccccgcgccacgtcacaaactccaccccctcattatcatattggcttcaatccaaaataaggtatattattgatgatgttaattaatttaaatccgcatgcgatatcgagctctcccgggaattcggatctgcgacgcgaggctggatggccttccccattatgattcttctcgcttccggcggcatcgggatgcccgcgttgcaggccatgctgtccaggcaggtagatgacgaccatcagggacagcttcacggccagcaaaaggccaggaaccgtaaaaaggccgcgttgctggcgtttttccataggctccgcccccctgacgagcatcacaaaaatcgacgctcaagtcagaggtggcgaaacccgacaggactataaagataccaggcgtttccccctggaagctccctcgtgcgctctcctgttccgaccctgccgcttaccggatacctgtccgcctttctcccttcgggaagcgtggcgctttctcaatgctcacgctgtaggtatctcagttcggtgtaggtcgttcgctccaagctgggctgtgtgcacgaaccccccgttcagcccgaccgctgcgccttatccggtaactatcgtcttgagtccaacccggtaagacacgacttatcgccactggcagcagccactggtaacaggattagcagagcgaggtatgtaggcggtgctacagagttcttgaagtggtggcctaactacggctacactagaaggacagtatttggtatctgcgctctgctgaagccagttaccttcggaaaaagagttggtagctcttgatccggcaaacaaaccaccgctggtagcggtggtttttttgtttgcaagcagcagattacgcgcagaaaaaaaggatctcaagaagatcctttgatcttttctacggggtctgacgctcagtggaacgaaaactcacgttaagggattttggtcatgagattatcaaaaaggatcttcacctagatccttttaaatcaatctaaagtatatatgagtaaacttggtctgacagttaccaatgcttaatcagtgaggcacctatctcagcgatctgtctatttcgttcatccatagttgcctgactccccgtcgtgtagataactacgatacgggagggcttaccatctggccccagtgctgcaatgataccgcgagacccacgctcaccggctccagatttatcagcaataaaccagccagccggaagggccgagcgcagaagtggtcctgcaactttatccgcctccatccagtctattaattgttgccgggaagctagagtaagtagttcgccagttaatagtttgcgcaacgttgttgccattgctgcaggcatcgtggtgtcacgctcgtcgtttggtatggcttcattcagctccggttcccaacgatcaaggcgagttacatgatcccccatgttgtgcaaaaaagcggttagctccttcggtcctccgatcgttgtcagaagtaagttggccgcagtgttatcactcatggttatggcagcactgcataattctcttactgtcatgccatccgtaagatgcttttctgtgactggtgagtactcaaccaagtcattctgagaatagtgtatgcggcgaccgagttgctcttgcccggcgtcaacacgggataataccgcgccacatagcagaactttaaaagtgctcatcattggaaaacgttcttcggggcgaaaactctcaaggatcttaccgctgttgagatccagttcgatgtaacccactcgtgcacccaactgatcttcagcatcttttactttcaccagcgtttctgggtgagcaaaaacaggaaggcaaaatgccgcaaaaaagggaataagggcgacacggaaatgttgaatactcatactcttcctttttcaatattattgaagcatttatcagggttattgtctcatgagcggatacatatttgaatgtatttagaaaaataaacaaataggggttccgcgcacatttccccgaaaagtgccacctgacgtctaagaaaccattattatcatgacattaacctataaaaataggcgtatcacgaggccctttcgtcttcaaggatccgaattcccgggagagctcgatatcgcatgcggatttaaattaattaa

SEQ ID NO: 28 - DNA, 20484 bp, Artificial Sequence
  Vector with soluble s4-1BBL ectodomain construct
accaaacaaagttgggtaaggatagttcaatcaatgatcatcttctagtgcacttaggattcaagatcctattatcagggacaagagcaggattagggatatctcgaggcgcgtgccaccatgcccatggggtctctgcaaccgctggccaccttgtacctgctggggatgctggtcgcttcctgcctcggaggcgttcgactttgggctacaagacaggcaatgctgggccaggtccatgaggttcctgaggggtggctcattttcgtggccgagcaggaggagctgtatgttcgcgtgcaaaacggctttaggaaggtccagctggaagcgcggacacctttgcccaggggaaccgataacgagggatccttggacctgcggcagggcatgtttgcgcagctggtggcccaaaatgttctgctgatcgatgggcccctgagctggtacagtgacccaggcctggcaggcgtgtccctgacggggggcctgagctacaaagaggacacgaaggagctggtggtggccaaggctggagtctactatgtcttctttcaactagagctgcggcgcgtggtggccggcgagggctcaggctccgtttcacttgcgctgcacctgcagccactgcgctctgctgctggggccgccgccctggctttgaccgtggacctgccacccgcctcctccgaggctcggaactcggccttcggtttccagggccgcttgctgcacctgagtgccggccagcgcctgggcgtccatcttcacactgaggccagggcacgccatgcctggcagcttacccagggcgccacagtcttgggactcttccgggtgacccccgaaatcccagccggactcccttcaccgaggtcggaataaacgcgccatccatcattgttataaaaaacttaggattcaagatcctattatcagggacaagagcaggattagggatatccgagatggccacacttttaaggagcttagcattgttcaaaagaaacaaggacaaaccacccattacatcaggatccggtggagccatcagaggaatcaaacacattattatagtaccaatccctggagattcctcaattaccactcgatccagacttctggaccggttggtgaggttaattggaaacccggatgtgagcgggcccaaactaacaggggcactaataggtatattatccttatttgtggagtctccaggtcaattgattcagaggatcaccgatgaccctgacgttagcataaggctgttagaggttgtccagagtgaccagtcacaatctggccttaccttcgcatcaagaggtaccaacatggaggatgaggcggaccaatacttttcacatgatgatccaattagtagtgatcaatccaggttcggatggttcgggaacaaggaaatctcagatattgaagtgcaagaccctgagggattcaacatgattctgggtaccatcctagcccaaatttgggtcttgctcgcaaaggcggttacggccccagacacggcagctgattcggagctaagaaggtggataaagtacacccaacaaagaagggtagttggtgaatttagattggagagaaaatggttggatgtggtgaggaacaggattgccgaggacctctccttacgccgattcatggtcgctctaatcctggatatcaagagaacacccggaaacaaacccaggattgctgaaatgatatgtgacattgatacatatatcgtagaggcaggattagccagttttatcctgactattaagtttgggatagaaactatgtatcctgctcttggactgcatgaatttgctggtgagttatccacacttgagtccttgatgaacctttaccagcaaatgggggaaactgcaccctacatggtaatcctggagaactcaattcagaacaagttcagtgcaggatcataccctctgctctggagctatgccatgggagtaggagtggaacttgaaaactccatgggaggtttgaactttggccgatcttactttgatccagcatattttagattagggcaagagatggtaaggaggtcagctggaaaggtcagttccacattggcatctgaactcggtatcactgccgaggatgcaaggcttgtttcagagattgcaatgcatactactgaggacaagatcagtagagcggttggacccagacaagcccaagtatcatttctacacggtgatcaaagtgagaatgagctaccgagattggggggcaaggaagataggagggtcaaacagagtcgaggagaagccagggagagctacagagaaaccgggcccagcagagcaagtgatgcgagagctgcccatcttccaaccggcacacccctagacattgacactgcaacggagtccagccaagatccgcaggacagtcgaaggtcagctgacgccctgcttaggctgcaagccatggcaggaatctcggaagaacaaggctcagacacggacacccctatagtgtacaatgacagaaatcttctagactaggtgcgagaggccgagggccagaacaacatccgcctaccatccatcattgttataaaaaacttaggaaccaggtccacacagccgccagcccatcaaccatccactcccacgattggagccaatggcagaagagcaggcacgccatgtcaaaaacggactggaatgcatccgggctctcaaggccgagcccatcggctcactggccatcgaggaagctatggcagcatggtcagaaatatcagacaacccaggacaggagcgagccacctgcagggaagagaaggcaggcagttcgggtctcagcaaaccatgcctctcagcaattggatcaactgaaggcggtgcacctcgcatccgcggtcagggacctggagagagcgatgacgacgctgaaactttgggaatccccccaagaaatctccaggcatcaagcactgggttacagtgttattacgtttatgatcacagcggtgaagcggttaagggaatccaagatgctgactctatcatggttcaatcaggccttgatggtgatagcaccctctcaggaggagacaatgaatctgaaaacagcgatgtggatattggcgaacctgataccgagggatatgctatcactgaccggggatctgctcccatctctatggggttcagggcttctgatgttgaaactgcagaaggaggggagatccacgagctcctgagactccaatccagaggcaacaactttccgaagcttgggaaaactctcaatgttcctccgcccccggaccccggtagggccagcacttccgggacacccattaaaaagggcacagacgcgagattagcctcatttggaacggagatcgcgtctttattgacaggtggtgcaacccaatgtgctcgaaagtcaccctcggaaccatcagggccaggtgcacctgcggggaatgtccccgagtgtgtgagcaatgccgcactgatacaggagtggacacccgaatctggtaccacaatctccccgagatcccagaataatgaagaagggggagactattatgatgatgagctgttctctgatgtccaagatattaaaacagccttggccaaaatacacgaggataatcagaagataatctccaagctagaatcactgctgttattgaagggagaagttgagtcaattaagaagcagatcaacaggcaaaatatcagcatatccaccctggaaggacacctctcaagcatcatgatcgccattcctggacttgggaaggatcccaacgaccccactgcagatgtcgaaatcaatcccgacttgaaacccatcataggcagagattcaggccgagcactggccgaagttctcaagaaacccgttgccagccgacaactccaaggaatgacaaatggacggaccagttccagaggacagctgctgaaggaatttcagctaaagccgatcgggaaaaagatgagctcagccgtcgggtttgttcctgacaccggccctgcatcacgcagtgtaatccgctccattataaaatccagccggctagaggaggatcggaagcgttacctgatgactctccttgatgatatcaaaggagccaatgatcttgccaagttccaccagatgctgatgaagataataatgaagtagctacagctcaacttacctgccaaccccatgccagtcgacccaactagtacaacctaaatccattataaaaaacttaggagcaaagtgattgcctcccaaggtccacaatgacagagacctacgacttcgacaagtcggcatgggacatcaaagggtcgatcgctccgatacaacccaccacctacagtgatggcaggctggtgccccaggtcagagtcatagatcctggtctaggcgacaggaaggatgaatgctttatgtacatgtttctgctgggggttgttgaggacagcgattccctagggcctccaatcgggcgagcatttgggttcctgcccttaggtgttggcagatccacagcaaagcccgaaaaactcctcaaagaggccactgagcttgacatagttgttagacgtacagcagggctcaatgaaaaactggtgttctacaacaacaccccactaactctcctcacaccttggagaaaggtcctaacaacagggagtgtcttcaacgcaaaccaagtgtgcaatgcggttaatctgataccgctcgataccccgcagaggttccgtgttgtttatatgagcatcacccgtctttcggataacgggtattacaccgttcctagaagaatgctggaattcagatcggtcaatgcagtggccttcaacctgctggtgacccttaggattgacaaggcgataggccctgggaagatcatcgacaatacagagcaacttcctgaggcaacatttatggtccacatcgggaacttcaggagaaagaagagtgaagtctactctgccgattattgcaaaatgaaaatcgaaaagatgggcctggtttttgcacttggtgggatagggggcaccagtcttcacattagaagcacaggcaaaatgagcaagactctccatgcacaactcgggttcaagaagaccttatgttacccgctgatggatatcaatgaagaccttaatcgattactctggaggagcagatgcaagatagtaagaatccaggcagttttgcagccatcagttcctcaagaattccgcatttacgacgacgtgatcataaatgatgaccaaggactattcaaagttctgtagaccgtagtgcccagcaatgcccgaaaacgacccccctcacaatgacagccagaaggcccggacaaaaaagccccctccgaaagactccacggaccaagcgagaggccagccagcagccgacggcaagcgcgaacaccaggcggccccagcacagaacagccctgacacaaggccaccaccagccaccccaatctgcatcctcctcgtgggacccccgaggaccaacccccaaggctgcccccgatccaaaccaccaaccgcatccccaccacccccgggaaagaaacccccagcaattggaaggcccctccccctcttcctcaacacaagaactccacaaccgaaccgcacaagcgaccgaggtgacccaaccgcaggcatccgactccctagacagatcctctctccccggcaaactaaacaaaacttagggccaaggaacatacacacccaacagaacccagaccccggcccacggcgccgcgcccccaacccccgacaaccagagggagcccccaaccaatcccgccggctcccccggtgcccacaggcagggacaccaacccccgaacagacccagcacccaaccatcgacaatccaagacgggggggcccccccaaaaaaaggcccccaggggccgacagccagcaccgcgaggaagcccacccaccccacacacgaccacggcaaccaaaccagaacccagaccaccctgggccaccagctcccagactcggccatcaccccgcagaaaggaaaggccacaacccgcgcaccccagccccgatccggcggggagccacccaacccgaaccagcacccaagagcgatccccgaaggacccccgaaccgcaaaggacatcagtatcccacagcctctccaagtcccccggtctcctcctcttctcgaagggaccaaaagatcaatccaccacacccgacgacactcaactccccacccctaaaggagacaccgggaatcccagaatcaagactcatccaatgtccatcatgggtctcaaggtgaacgtctctgccatattcatggcagtactgttaactctccaaacacccaccggtcaaatccattggggcaatctctctaagataggggtggtaggaataggaagtgcaagctacaaagttatgactcgttccagccatcaatcattagtcataaaattaatgcccaatataactctcctcaataactgcacgagggtagagattgcagaatacaggagactactgagaacagttttggaaccaattagagatgcacttaatgcaatgacccagaatataagaccggttcagagtgtagcttcaagtaggagacacaagagatttgcgggagtagtcctggcaggtgcggccctaggcgttgccacagctgctcagataacagccggcattgcacttcaccagtccatgctgaactctcaagccatcgacaatctgagagcgagcctggaaactactaatcaggcaattgagacaatcagacaagcagggcaggagatgatattggctgttcagggtgtccaagactacatcaataatgagctgataccgtctatgaaccaactatcttgtgatttaatcggccagaagctcgggctcaaattgctcagatactatacagaaatcctgtcattatttggccccagtttacgggaccccatatctgcggagatatctatccaggctttgagctatgcgcttggaggagacatcaataaggtgttagaaaagctcggatacagtggaggtgatttactgggcatcttagagagcggaggcatcaaggcccggataactcacgtcgacacagagtcctacttcattgtcctcagtatagcctatccgacgctgtccgagattaagggggtgattgtccaccggctagagggggtctcgtacaacataggctctcaagagtggtataccactgtgcccaagtatgttgcaacccaagggtaccttatctcgaattttgatgagtcatcgtgtactttcatgccagaggggactgtgtgcagccaaaatgccttgtacccgatgagtcctctgctccaagaatgcctccgggggtacaccaagtcctgtgctcgtacactcgtatccgggtcttttgggaaccggttcattttatcacaagggaacctaatagccaattgtgcatcaatcctttgcaagtgttacacaacaggaacgatcattaatcaagaccctgacaagatcctaacatacattgctgccgatcactgcccggtagtcgaggtgaacggcgtgaccatccaagtcgggagcaggaggtatccagacgctgtgtacttgcacagaattgacctcggtcctcccatatcattggagaggttggacgtagggacaaatctggggaatgcaattgctaagttggaggatgccaaggaattgttggagtcatcggaccagatattgaggagtatgaaaggtttatcgagcactagcatagtctacatcctgattgcagtgtgtcttggagggttgatagggatccccgctttaatatgttgctgcagggggcgttgtaacaaaaagggagaacaagttggtatgtcaagaccaggcctaaagcctgatcttacgggaacatcaaaatcctatgtaaggtcgctctgatcctctacaactcttgaaacacaaatgtcccacaagtctcctcttcgtcatcaagcaaccaccgcacccagcatcaagcccacctgaaattatctccggcttccctctggccgaacaatatcggtagttaatcaaaacttagggtgcaagatcatccacaatgtcaccacaacgagaccggataaatgccttctacaaagataacccccatcccaagggaagtaggatagtcattaacagagaacatcttatgattgatagaccttatgttttgctggctgttctgtttgtcatgtttctgagcttgatcgggttgctagccattgcaggcattagacttcatcgggcagccatctacaccgcagagatccataaaagcctcagcaccaatctagatgtaactaactcaatcgagcatcaggtcaaggacgtgctgacaccactcttcaaaatcatcggtgatgaagtgggcctgaggacacctcagagattcactgacctagtgaaattaatctctgacaagatcaagttccttaatccggatagggagtacgacttcagagatctcacttggtgtatcaacccgccagagagaatcaaattggattatgatcaatactgtgcagatgtggctgctgaagagctcatgaatgcattggtgaactcaactctactggagaccagaacaaccaatcagttcctagctgtctcaaagggaaactgctcagggcccactacaatcagaggtcaattctcaaacatgtcgctgtccctgttagacttgtatttaggtcgaggttacaatgtgtcatctatagtcactatgacatcccagggaatgtatgggggaacttacctagtggaaaagcctaatctgagcagcaaaaggtcagagttgtcacaactgagcatgtaccgagtgtttgaagtaggtgttatcagaaatccgggtttgggggctccggtgttccatatgacaaactatcttgagcaaccagtcagtaatgatctcagcaactgtatggtggctttgggggagctcaaactcgcagccctttgtcacggggaagattctatcacaattccctatcagggatcagggaaaggtgtcagcttccagctcgtcaagctaggtgtctggaaatccccaaccgacatgcaatcctgggtccccttatcaacggatgatccagtgatagacaggctttacctctcatctcacagaggtgttatcgctgacaatcaagcaaaatgggctgtcccgacaacacgaacagatgacaagttgcgaatggagacatgcttccaacaggcgtgtaagggtaaaatccaagcactctgcgagaatcccgagtgggcaccattgaaggataacaggattccttcatacggggtcttgtctgttgatctgagtctgacagttgagcttaaaatcaaaattgcttcgggattcgggccattgatcacacacggttcagggatggacctatacaaatccaaccacaacaatgtgtattggctgactatcccgccaatgaagaacctagccttaggtgtaatcaacacattggagtggataccgagattcaaggttagtccctacctcttcactgtcccaattaaggaagcaggcgaagactgccatgccccaacatacctacctgcggaggtggatggtgatgtcaaactcagttccaatctggtgattctacctggtcaagatctccaatatgttttggcaacctacgatacttccagggttgaacatgctgtggtttattacgtttacagcccaagccgctcattttcttacttttatccttttaggttgcctataaagggggtccccatcgaattacaagtggaatgcttcacatgggaccaaaaactctggtgccgtcacttctgtgtgcttgcggactcagaatctggtggacatatcactcactctgggatggtgggcatgggagtcagctgcacagtcacccgggaagatggaaccaatcgcagatagggctgctagtgaaccaatcacatgatgtcacccagacatcaggcatacccactagtgtgaaatagacatcagaattaagaaaaacgtagggtccaagtggttccccgttatggactcgctatctgtcaaccagatcttataccctgaagttcacctagatagcccgatagttaccaataagatagtagccatcctggagtatgctcgagtccctcacgcttacagcctggaggaccctacactgtgtcagaacatcaagcaccgcctaaaaaacggattttccaaccaaatgattataaacaatgtggaagttgggaatgtcatcaagtccaagcttaggagttatccggcccactctcatattccatatccaaattgtaatcaggatttatttaacatagaagacaaagagtcaacgaggaagatccgtgaactcctcaaaaaggggaattcgctgtactccaaagtcagtgataaggttttccaatgcttaagggacactaactcacggcttggcctaggctccgaattgagggaggacatcaaggagaaagttattaacttgggagtttacatgcacagctcccagtggtttgagccctttctgttttggtttacagtcaagactgagatgaggtcagtgattaaatcacaaacccatacttgccataggaggagacacacacctgtattcttcactggtagttcagttgagttgctaatctctcgtgaccttgttgctataatcagtaaagagtctcaacatgtatattacctgacatttgaactggttttgatgtattgtgatgtcatagaggggaggttaatgacagagaccgctatgactattgatgctaggtatacagagcttctaggaagagtcagatacatgtggaaactgatagatggtttcttccctgcactcgggaatccaacttatcaaattgtagccatgctggagcctctttcacttgcttacctgcagctgagggatataacagtagaactcagaggtgctttccttaaccactgctttactgaaatacatgatgttcttgaccaaaacgggttttctgatgaaggtacttatcatgagttaactgaagctctagattacattttcataactgatgacatacatctgacaggggagattttctcatttttcagaagtttcggccaccccagacttgaagcagtaacggctgctgaaaatgttaggaaatacatgaatcagcctaaagtcattgtgtatgagactctgatgaaaggtcatgccatattttgtggaatcataatcaacggctatcgtgacaggcacggaggcagttggccaccgctgaccctccccctgcatgctgcagacacaatccggaatgctcaagcttcaggtgaagggttaacacatgagcagtgcgttgataactggaaatcttttgctggagtgaaatttggctgctttatgcctcttagcctggatagtgatctgacaatgtacctaaaggacaaggcacttgctgctctccaaagggaatgggattcagtttacccgaaagagttcctgcgttacgaccctcccaagggaaccgggtcacggaggcttgtagatgttttccttaatgattcgagctttgacccatatgatgtgataatgtatgttgtaagtggagcttacctccatgaccctgagttcaacctgtcttacagcctgaaagaaaaggagatcaaggaaacaggtagactttttgctaaaatgacttacaaaatgagggcatgccaagtgattgctgaaaatctaatctcaaacgggattggcaaatattttaaggacaatgggatggccaaggatgagcacgatttgactaaggcactccacactctagctgtctcaggagtccccaaagatctcaaagaaagtcacaggggggggccagtcttaaaaacctactcccgaagcccagtccacacaagtaccaggaacgtgagagcagcaaaagggtttatagggttccctcaagtaattcggcaggaccaagacactgatcatccggagaatatggaagcttacgagacagtcagtgcatttatcacgactgatctcaagaagtactgccttaattggagatatgagaccatcagcttgtttgcacagaggctaaatgagatttacggattgccctcatttttccagtggctgcataagaggcttgagacctctgtcctgtatgtaagtgaccctcattgcccccccgaccttgacgcccatatcccgttatataaagtccccaatgatcaaatcttcattaagtaccctatgggaggtatagaagggtattgtcagaagctgtggaccatcagcaccattccctatctatacctggctgcttatgagagcggagtaaggattgcttcgttagtgcaaggggacaatcagaccatagccgtaacaaaaagggtacccagcacatggccctacaaccttaagaaacgggaagctgctagagtaactagagattactttgtaattcttaggcaaaggctacatgatattggccatcacctcaaggcaaatgagacaattgtttcatcacatttttttgtctattcaaaaggaatatattatgatgggctacttgtgtcccaatcactcaagagcatcgcaagatgtgtattctggtcagagactatagttgatgaaacaagggcagcatgcagtaatattgctacaacaatggctaaaagcatcgagagaggttatgaccgttaccttgcatattccctgaacgtcctaaaagtgatacagcaaattctgatctctcttggcttcacaatcaattcaaccatgacccgggatgtagtcatacccctcctcacaaacaacgacctcttaataaggatggcactgttgcccgctcctattggggggatgaattatctgaatatgagcaggctgtttgtcagaaacatcggtgatccagtaacatcatcaattgctgatctcaagagaatgattctcgcctcactaatgcctgaagagaccctccatcaagtaatgacacaacaaccgggggactcttcattcctagactgggctagcgacccttactcagcaaatcttgtatgtgtccagagcatcactagactcctcaagaacataactgcaaggtttgtcctgatccatagtccaaacccaatgttaaaaggattattccatgatgacagtaaagaagaggacgagggactggcggcattcctcatggacaggcatattatagtacctagggcagctcatgaaatcctggatcatagtgtcacaggggcaagagagtctattgcaggcatgctggataccacaaaaggcttgattcgagccagcatgaggaagggggggttaacctctcgagtgataaccagattgtccaattatgactatgaacaattcagagcagggatggtgctattgacaggaagaaagagaaatgtcctcattgacaaagagtcatgttcagtgcagctggcgagagctctaagaagccatatgtgggcgaggctagctcgaggacggcctatttacggccttgaggtccctgatgtactagaatctatgcgaggccaccttattcggcgtcatgagacatgtgtcatctgcgagtgtggatcagtcaactacggatggttttttgtcccctcgggttgccaactggatgatattgacaaggaaacatcatccttgagagtcccatatattggttctaccactgatgagagaacagacatgaagcttgccttcgtaagagccccaagtcgatccttgcgatctgctgttagaatagcaacagtgtactcatgggcttacggtgatgatgatagctcttggaacgaagcctggttgttggctaggcaaagggccaatgtgagcctggaggagctaagggtgatcactcccatctcaacttcgactaatttagcgcataggttgagggatcgtagcactcaagtgaaatactcaggtacatcccttgtccgagtggcgaggtataccacaatctccaacgacaatctctcatttgtcatatcagataagaaggttgatactaactttatataccaacaaggaatgcttctagggttgggtgttttagaaacattgtttcgactcgagaaagataccggatcatctaacacggtattacatcttcacgtcgaaacagattgttgcgtgatcccgatgatagatcatcccaggatacccagctcccgcaagctagagctgagggcagagctatgtaccaacccattgatatatgataatgcacctttaattgacagagatgcaacaaggctatacacccagagccataggaggcaccttgtggaatttgttacatggtccacaccccaactatatcacattttagctaagtccacagcactatctatgattgacctggtaacaaaatttgagaaggaccatatgaatgaaatttcagctctcataggggatgacgatatcaatagtttcataactgagtttctgctcatagagccaagattattcactatctacttgggccagtgtgcggccatcaattgggcatttgatgtacattatcatagaccatcagggaaatatcagatgggtgagctgttgtcatcgttcctttctagaatgagcaaaggagtgtttaaggtgcttgtcaatgctctaagccacccaaagatctacaagaaattctggcattgtggtattatagagcctatccatggtccttcacttgatgctcaaaacttgcacacaactgtgtgcaacatggtttacacatgctatatgacctacctcgacctgttgttgaatgaagagttagaagagttcacatttctcttgtgtgaaagcgacgaggatgtagtaccggacagattcgacaacatccaggcaaaacacttatgtgttctggcagatttgtactgtcaaccagggacctgcccaccaattcgaggtctaagaccggtagagaaatgtgcagttctaaccgaccatatcaaggcagaggctatgttatctccagcaggatcttcgtggaacataaatccaattattgtagaccattactcatgctctctgacttatctccggcgaggatcgatcaaacagataagattgagagttgatccaggattcattttcgacgccctcgctgaggtaaatgtcagtcagccaaagatcggcagcaacaacatctcaaatatgagcatcaaggctttcagacccccacacgatgatgttgcaaaattgctcaaagatatcaacacaagcaagcacaatcttcccatttcagggggcaatctcgccaattatgaaatccatgctttccgcagaatcgggttgaactcatctgcttgctacaaagctgttgagatatcaacattaattaggagatgccttgagccaggggaggacggcttgttcttgggtgagggatcgggttctatgttgatcacttataaagagatacttaaactaaacaagtgcttctataatagtggggtttccgccaattctagatctggtcaaagggaattagcaccctatccctccgaagttggccttgtcgaacacagaatgggagtaggtaatattgtcaaagtgctctttaacgggaggcccgaagtcacgtgggtaggcagtgtagattgcttcaatttcatagttagtaatatccctacctctagtgtggggtttatccattcagatatagagaccttgcctgacaaagatactatagagaagctagaggaattggcagccatcttatcgatggctctgctcctgggcaaaataggatcaatactggtgattaagcttatgcctttcagcggggattttgttcagggatttataagttatgtagggtctcattatagagaagtgaaccttgtataccctagatacagcaacttcatctctactgaatcttatttggttatgacagatctcaaggctaaccggctaatgaatcctgaaaagattaagcagcagataattgaatcatctgtgaggacttcacctggacttataggtcacatcctatccattaagcaactaagctgcatacaagcaattgtgggagacgcagttagtagaggtgatatcaatcctactctgaaaaaacttacacctatagagcaggtgctgatcaattgcgggttggcaattaacggacctaagctgtgcaaagaattgatccaccatgatgttgcctcagggcaagatggattgcttaattctatactcatcctctacagggagttggcaagattcaaagacaaccaaagaagtcaacaagggatgttccacgcttaccccgtattggtaagtagcaggcaacgagaacttatatctaggatcacccgcaaattctgggggcacattcttctttactccgggaacaaaaagttgataaataagtttatccagaatctcaagtccggctatctgatactagacttacaccagaatatcttcgttaagaatctatccaagtcagagaaacagattattatgacggggggtttgaaacgtgagtgggtttttaaggtaacagtcaaggagaccaaagaatggtataagttagtcggatacagtgccctgattaaggactaattggttgaactccggaaccctaatcctgccctaggtggttaggcattatttgcaatatattaaagaaaactttgaaaatacgaagtttctattcccagctttgtctggtggccggcatggtcccagcctcctcgctggcgccggctgggcaacattccgaggggaccgtcccctcggtaatggcgaatgggacgcggccggtcgatcgacgatccggctgctaacaaagcccgaaaggaagctgagttggctgctgccaccgctgagcaataactagcataaccccttggggcctctaaacgggtcttgaggggttttttgctgaaaggaggaactatatccggatcgagatcaattctgtgagcgtatggcaaacgaaggaaaaatagttatagtagccgcactcgatgggacatttcaacgtaaaccgtttaataatattttgaatcttattccattatctgaaatggtggtaaaactaactgctgtgtgtatgaaatgctttaaggaggcttccttttctaaacgattgggtgaggaaaccgagatagaaataataggaggtaatgatatgtatcaatcggtgtgtagaaagtgttacatcgactcataatattatattttttatctaaaaaactaaaaataaacattgattaaattttaatataatacttaaaaatggatgttgtgtcgttagataaaccgtttatgtattttgaggaaattgataatgagttagattacgaaccagaaagtgcaaatgaggtcgcaaaaaaactgccgtatcaaggacagttaaaactattactaggagaattattttttcttagtaagttacagcgacacggtatattagatggtgccaccgtagtgtatataggatctgctcccggtacacatatacgttatttgagagatcatttctataatttaggagtgatcccgaaaggaagctgagttggctgctgccaccgctgagcaataactagcataaccccttggggcctctaaacgggtcttgaggggttttttgctgaaaggaggaacgcgcctgatgcggtattttctccttacgcatctgtgcggtatttcacaccgcatatatggtgcactctcagtacaatctgctctgatgccgcatagttaagccagccccgacacccgccaacacccgctgacgcgccctgacgggcttgtctgctcccggcatccgcttacagacaagctgtgaccgtctccgggagctgcatgtgtcagaggttttcaccgtcatcaccgaaacgcgcgagacgaaagggcctcgtgatacgcctatttttataggttaatgtcatgataataatggtttcttagacgtcaggtggcacttttcggggaaatgtgcgcggaacccctatttgtttatttttctaaatacattcaaatatgtatccgctcatgagacaataaccctgataaatgcttcaataatattgaaaaaggaagagtatgagtattcaacatttccgtgtcgcccttattcccttttttgcggcattttgccttcctgtttttgctcacccagaaacgctggtgaaagtaaaagatgctgaagatcagttgggtgcacgagtgggttacatcgaactggatctcaacagcggtaagatccttgagagttttcgccccgaagaacgttttccaatgatgagcacttttaaagttctgctatgtggcgcggtattatcccgtattgacgccgggcaagagcaactcggtcgccgcatacactattctcagaatgacttggttgagtactcaccagtcacagaaaagcatcttacggatggcatgacagtaagagaattatgcagtgctgccataaccatgagtgataacactgcggccaacttacttctgacaacgatcggaggaccgaaggagctaaccgcttttttgcacaacatgggggatcatgtaactcgccttgatcgttgggaaccggagctgaatgaagccataccaaacgacgagcgtgacaccacgatgcctgtagcaatggcaacaacgttgcgcaaactattaactggcgaactacttactctagcttcccggcaacaattaatagactggatggaggcggataaagttgcaggaccacttctgcgctcggcccttccggctggctggtttattgctgataaatctggagccggtgagcgtgggtctcgcggtatcattgcagcactggggccagatggtaagccctcccgtatcgtagttatctacacgacggggagtcaggcaactatggatgaacgaaatagacagatcgctgagataggtgcctcactgattaagcattggtaactgtcagaccaagtttactcatatatactttagattgatttaaaacttcatttttaatttaaaaggatctaggtgaagatcctttttgataatctcatgaccaaaatcccttaacgtgagttttcgttccactgagcgtcagaccccgtagaaaagatcaaaggatcttcttgagatcctttttttctgcgcgtaatctgctgcttgcaaacaaaaaaaccaccgctaccagcggtggtttgtttgccggatcaagagctaccaactctttttccgaaggtaactggcttcagcagagcgcagataccaaatactgtccttctagtgtagccgtagttaggccaccacttcaagaactctgtagcaccgcctacatacctcgctctgctaatcctgttaccagtggctgctgccagtggcgataagtcgtgtcttaccgggttggactcaagacgatagttaccggataaggcgcagcggtcgggctgaacggggggttcgtgcacacagcccagcttggagcgaacgacctacaccgaactgagatacctacagcgtgagcattgagaaagcgccacgcttcccgaagggagaaaggcggacaggtatccggtaagcggcagggtcggaacaggagagcgcacgagggagcttccagggggaaacgcctggtatctttatagtcctgtcgggtttcgccacctctgacttgagcgtcgatttttgtgatgctcgtcaggggggcggagcctatggaaaaacgccagcaacgcggcctttttacggttcctggccttttgctggccttttgctcacatgttctttcctgcgttatcccctgattctgtggataaccgtattaccgcctttgagtgagctgataccgctcgccgcagccgaacgaccgagcgcagcgagtcagtgagcgaggaagcggaagagcgcccaatacgcaaaccgcctctccccgcgcgttggccgattcattaatgcagctggcacgacaggtttcccgactggaaagcgggcagtgagcgcaacgcaattaatgtgagttagctcactcattaggcaccccaggctttacactttatgcttccggctcgtatgttgtgtggaattgtgagcggataacaatttcacacaggaaacagctatgaccatgattacgccaagcttacgcgtcctggcattatgcccagtacatgaccttatgggactttcctacttggcagtacatctacgtattagtcatcgctattaccatggtgatgcggttttggcagtacatcaatgggcgtggatagcggtttgactcacggggatttccaagtctccaccccattgacgtcaatgggagtttgttttggcaccaaaatcaacgggactttccaaaatgtcgtaacaactccgccccattgacgcaaatgggcggtaggcgtgtacggtgggaggtctatataagcagagctcgtttagtgaaccgtgg

SEQ ID NO: 29 - DNA, 20538 bp, Artificial Sequence
  Vector with soluble s4-1BBL ectodomain construct
accaaacaaagttgggtaaggatagttcaatcaatgatcatcttctagtgcacttaggattcaagatcctattatcagggacaagagcaggattagggatatctcgaggcgcgtgccaccatgcccatggggtctctgcaaccgctggccaccttgtacctgctggggatgctggtcgcttcctgcctcggatctggtgctggaggatcaggtggttctagtggaagtgatggtgctagcgggtctggcgttcgactttgggctacaagacaggcaatgctgggccaggtccatgaggttcctgaggggtggctcattttcgtggccgagcaggaggagctgtatgttcgcgtgcaaaacggctttaggaaggtccagctggaagcgcggacacctttgcccaggggaaccgataacgagggatccttggacctgcggcagggcatgtttgcgcagctggtggcccaaaatgttctgctgatcgatgggcccctgagctggtacagtgacccaggcctggcaggcgtgtccctgacggggggcctgagctacaaagaggacacgaaggagctggtggtggccaaggctggagtctactatgtcttctttcaactagagctgcggcgcgtggtggccggcgagggctcaggctccgtttcacttgcgctgcacctgcagccactgcgctctgctgctggggccgccgccctggctttgaccgtggacctgccacccgcctcctccgaggctcggaactcggccttcggtttccagggccgcttgctgcacctgagtgccggccagcgcctgggcgtccatcttcacactgaggccagggcacgccatgcctggcagcttacccagggcgccacagtcttgggactcttccgggtgacccccgaaatcccagccggactcccttcaccgaggtcggaataaacgcgccatccatcattgttataaaaaacttaggattcaagatcctattatcagggacaagagcaggattagggatatccgagatggccacacttttaaggagcttagcattgttcaaaagaaacaaggacaaaccacccattacatcaggatccggtggagccatcagaggaatcaaacacattattatagtaccaatccctggagattcctcaattaccactcgatccagacttctggaccggttggtgaggttaattggaaacccggatgtgagcgggcccaaactaacaggggcactaataggtatattatccttatttgtggagtctccaggtcaattgattcagaggatcaccgatgaccctgacgttagcataaggctgttagaggttgtccagagtgaccagtcacaatctggccttaccttcgcatcaagaggtaccaacatggaggatgaggcggaccaatacttttcacatgatgatccaattagtagtgatcaatccaggttcggatggttcgggaacaaggaaatctcagatattgaagtgcaagaccctgagggattcaacatgattctgggtaccatcctagcccaaatttgggtcttgctcgcaaaggcggttacggccccagacacggcagctgattcggagctaagaaggtggataaagtacacccaacaaagaagggtagttggtgaatttagattggagagaaaatggttggatgtggtgaggaacaggattgccgaggacctctccttacgccgattcatggtcgctctaatcctggatatcaagagaacacccggaaacaaacccaggattgctgaaatgatatgtgacattgatacatatatcgtagaggcaggattagccagttttatcctgactattaagtttgggatagaaactatgtatcctgctcttggactgcatgaatttgctggtgagttatccacacttgagtccttgatgaacctttaccagcaaatgggggaaactgcaccctacatggtaatcctggagaactcaattcagaacaagttcagtgcaggatcataccctctgctctggagctatgccatgggagtaggagtggaacttgaaaactccatgggaggtttgaactttggccgatcttactttgatccagcatattttagattagggcaagagatggtaaggaggtcagctggaaaggtcagttccacattggcatctgaactcggtatcactgccgaggatgcaaggcttgtttcagagattgcaatgcatactactgaggacaagatcagtagagcggttggacccagacaagcccaagtatcatttctacacggtgatcaaagtgagaatgagctaccgagattggggggcaaggaagataggagggtcaaacagagtcgaggagaagccagggagagctacagagaaaccgggcccagcagagcaagtgatgcgagagctgcccatcttccaaccggcacacccctagacattgacactgcaacggagtccagccaagatccgcaggacagtcgaaggtcagctgacgccctgcttaggctgcaagccatggcaggaatctcggaagaacaaggctcagacacggacacccctatagtgtacaatgacagaaatcttctagactaggtgcgagaggccgagggccagaacaacatccgcctaccatccatcattgttataaaaaacttaggaaccaggtccacacagccgccagcccatcaaccatccactcccacgattggagccaatggcagaagagcaggcacgccatgtcaaaaacggactggaatgcatccgggctctcaaggccgagcccatcggctcactggccatcgaggaagctatggcagcatggtcagaaatatcagacaacccaggacaggagcgagccacctgcagggaagagaaggcaggcagttcgggtctcagcaaaccatgcctctcagcaattggatcaactgaaggcggtgcacctcgcatccgcggtcagggacctggagagagcgatgacgacgctgaaactttgggaatccccccaagaaatctccaggcatcaagcactgggttacagtgttattacgtttatgatcacagcggtgaagcggttaagggaatccaagatgctgactctatcatggttcaatcaggccttgatggtgatagcaccctctcaggaggagacaatgaatctgaaaacagcgatgtggatattggcgaacctgataccgagggatatgctatcactgaccggggatctgctcccatctctatggggttcagggcttctgatgttgaaactgcagaaggaggggagatccacgagctcctgagactccaatccagaggcaacaactttccgaagcttgggaaaactctcaatgttcctccgcccccggaccccggtagggccagcacttccgggacacccattaaaaagggcacagacgcgagattagcctcatttggaacggagatcgcgtctttattgacaggtggtgcaacccaatgtgctcgaaagtcaccctcggaaccatcagggccaggtgcacctgcggggaatgtccccgagtgtgtgagcaatgccgcactgatacaggagtggacacccgaatctggtaccacaatctccccgagatcccagaataatgaagaagggggagactattatgatgatgagctgttctctgatgtccaagatattaaaacagccttggccaaaatacacgaggataatcagaagataatctccaagctagaatcactgctgttattgaagggagaagttgagtcaattaagaagcagatcaacaggcaaaatatcagcatatccaccctggaaggacacctctcaagcatcatgatcgccattcctggacttgggaaggatcccaacgaccccactgcagatgtcgaaatcaatcccgacttgaaacccatcataggcagagattcaggccgagcactggccgaagttctcaagaaacccgttgccagccgacaactccaaggaatgacaaatggacggaccagttccagaggacagctgctgaaggaatttcagctaaagccgatcgggaaaaagatgagctcagccgtcgggtttgttcctgacaccggccctgcatcacgcagtgtaatccgctccattataaaatccagccggctagaggaggatcggaagcgttacctgatgactctccttgatgatatcaaaggagccaatgatcttgccaagttccaccagatgctgatgaagataataatgaagtagctacagctcaacttacctgccaaccccatgccagtcgacccaactagtacaacctaaatccattataaaaaacttaggagcaaagtgattgcctcccaaggtccacaatgacagagacctacgacttcgacaagtcggcatgggacatcaaagggtcgatcgctccgatacaacccaccacctacagtgatggcaggctggtgccccaggtcagagtcatagatcctggtctaggcgacaggaaggatgaatgctttatgtacatgtttctgctgggggttgttgaggacagcgattccctagggcctccaatcgggcgagcatttgggttcctgcccttaggtgttggcagatccacagcaaagcccgaaaaactcctcaaagaggccactgagcttgacatagttgttagacgtacagcagggctcaatgaaaaactggtgttctacaacaacaccccactaactctcctcacaccttggagaaaggtcctaacaacagggagtgtcttcaacgcaaaccaagtgtgcaatgcggttaatctgataccgctcgataccccgcagaggttccgtgttgtttatatgagcatcacccgtctttcggataacgggtattacaccgttcctagaagaatgctggaattcagatcggtcaatgcagtggccttcaacctgctggtgacccttaggattgacaaggcgataggccctgggaagatcatcgacaatacagagcaacttcctgaggcaacatttatggtccacatcgggaacttcaggagaaagaagagtgaagtctactctgccgattattgcaaaatgaaaatcgaaaagatgggcctggtttttgcacttggtgggatagggggcaccagtcttcacattagaagcacaggcaaaatgagcaagactctccatgcacaactcgggttcaagaagaccttatgttacccgctgatggatatcaatgaagaccttaatcgattactctggaggagcagatgcaagatagtaagaatccaggcagttttgcagccatcagttcctcaagaattccgcatttacgacgacgtgatcataaatgatgaccaaggactattcaaagttctgtagaccgtagtgcccagcaatgcccgaaaacgacccccctcacaatgacagccagaaggcccggacaaaaaagccccctccgaaagactccacggaccaagcgagaggccagccagcagccgacggcaagcgcgaacaccaggcggccccagcacagaacagccctgacacaaggccaccaccagccaccccaatctgcatcctcctcgtgggacccccgaggaccaacccccaaggctgcccccgatccaaaccaccaaccgcatccccaccacccccgggaaagaaacccccagcaattggaaggcccctccccctcttcctcaacacaagaactccacaaccgaaccgcacaagcgaccgaggtgacccaaccgcaggcatccgactccctagacagatcctctctccccggcaaactaaacaaaacttagggccaaggaacatacacacccaacagaacccagaccccggcccacggcgccgcgcccccaacccccgacaaccagagggagcccccaaccaatcccgccggctcccccggtgcccacaggcagggacaccaacccccgaacagacccagcacccaaccatcgacaatccaagacgggggggcccccccaaaaaaaggcccccaggggccgacagccagcaccgcgaggaagcccacccaccccacacacgaccacggcaaccaaaccagaacccagaccaccctgggccaccagctcccagactcggccatcaccccgcagaaaggaaaggccacaacccgcgcaccccagccccgatccggcggggagccacccaacccgaaccagcacccaagagcgatccccgaaggacccccgaaccgcaaaggacatcagtatcccacagcctctccaagtcccccggtctcctcctcttctcgaagggaccaaaagatcaatccaccacacccgacgacactcaactccccacccctaaaggagacaccgggaatcccagaatcaagactcatccaatgtccatcatgggtctcaaggtgaacgtctctgccatattcatggcagtactgttaactctccaaacacccaccggtcaaatccattggggcaatctctctaagataggggtggtaggaataggaagtgcaagctacaaagttatgactcgttccagccatcaatcattagtcataaaattaatgcccaatataactctcctcaataactgcacgagggtagagattgcagaatacaggagactactgagaacagttttggaaccaattagagatgcacttaatgcaatgacccagaatataagaccggttcagagtgtagcttcaagtaggagacacaagagatttgcgggagtagtcctggcaggtgcggccctaggcgttgccacagctgctcagataacagccggcattgcacttcaccagtccatgctgaactctcaagccatcgacaatctgagagcgagcctggaaactactaatcaggcaattgagacaatcagacaagcagggcaggagatgatattggctgttcagggtgtccaagactacatcaataatgagctgataccgtctatgaaccaactatcttgtgatttaatcggccagaagctcgggctcaaattgctcagatactatacagaaatcctgtcattatttggccccagtttacgggaccccatatctgcggagatatctatccaggctttgagctatgcgcttggaggagacatcaataaggtgttagaaaagctcggatacagtggaggtgatttactgggcatcttagagagcggaggcatcaaggcccggataactcacgtcgacacagagtcctacttcattgtcctcagtatagcctatccgacgctgtccgagattaagggggtgattgtccaccggctagagggggtctcgtacaacataggctctcaagagtggtataccactgtgcccaagtatgttgcaacccaagggtaccttatctcgaattttgatgagtcatcgtgtactttcatgccagaggggactgtgtgcagccaaaatgccttgtacccgatgagtcctctgctccaagaatgcctccgggggtacaccaagtcctgtgctcgtacactcgtatccgggtcttttgggaaccggttcattttatcacaagggaacctaatagccaattgtgcatcaatcctttgcaagtgttacacaacaggaacgatcattaatcaagaccctgacaagatcctaacatacattgctgccgatcactgcccggtagtcgaggtgaacggcgtgaccatccaagtcgggagcaggaggtatccagacgctgtgtacttgcacagaattgacctcggtcctcccatatcattggagaggttggacgtagggacaaatctggggaatgcaattgctaagttggaggatgccaaggaattgttggagtcatcggaccagatattgaggagtatgaaaggtttatcgagcactagcatagtctacatcctgattgcagtgtgtcttggagggttgatagggatccccgctttaatatgttgctgcagggggcgttgtaacaaaaagggagaacaagttggtatgtcaagaccaggcctaaagcctgatcttacgggaacatcaaaatcctatgtaaggtcgctctgatcctctacaactcttgaaacacaaatgtcccacaagtctcctcttcgtcatcaagcaaccaccgcacccagcatcaagcccacctgaaattatctccggcttccctctggccgaacaatatcggtagttaatcaaaacttagggtgcaagatcatccacaatgtcaccacaacgagaccggataaatgccttctacaaagataacccccatcccaagggaagtaggatagtcattaacagagaacatcttatgattgatagaccttatgttttgctggctgttctgtttgtcatgtttctgagcttgatcgggttgctagccattgcaggcattagacttcatcgggcagccatctacaccgcagagatccataaaagcctcagcaccaatctagatgtaactaactcaatcgagcatcaggtcaaggacgtgctgacaccactcttcaaaatcatcggtgatgaagtgggcctgaggacacctcagagattcactgacctagtgaaattaatctctgacaagatcaagttccttaatccggatagggagtacgacttcagagatctcacttggtgtatcaacccgccagagagaatcaaattggattatgatcaatactgtgcagatgtggctgctgaagagctcatgaatgcattggtgaactcaactctactggagaccagaacaaccaatcagttcctagctgtctcaaagggaaactgctcagggcccactacaatcagaggtcaattctcaaacatgtcgctgtccctgttagacttgtatttaggtcgaggttacaatgtgtcatctatagtcactatgacatcccagggaatgtatgggggaacttacctagtggaaaagcctaatctgagcagcaaaaggtcagagttgtcacaactgagcatgtaccgagtgtttgaagtaggtgttatcagaaatccgggtttgggggctccggtgttccatatgacaaactatcttgagcaaccagtcagtaatgatctcagcaactgtatggtggctttgggggagctcaaactcgcagccctttgtcacggggaagattctatcacaattccctatcagggatcagggaaaggtgtcagcttccagctcgtcaagctaggtgtctggaaatccccaaccgacatgcaatcctgggtccccttatcaacggatgatccagtgatagacaggctttacctctcatctcacagaggtgttatcgctgacaatcaagcaaaatgggctgtcccgacaacacgaacagatgacaagttgcgaatggagacatgcttccaacaggcgtgtaagggtaaaatccaagcactctgcgagaatcccgagtgggcaccattgaaggataacaggattccttcatacggggtcttgtctgttgatctgagtctgacagttgagcttaaaatcaaaattgcttcgggattcgggccattgatcacacacggttcagggatggacctatacaaatccaaccacaacaatgtgtattggctgactatcccgccaatgaagaacctagccttaggtgtaatcaacacattggagtggataccgagattcaaggttagtccctacctcttcactgtcccaattaaggaagcaggcgaagactgccatgccccaacatacctacctgcggaggtggatggtgatgtcaaactcagttccaatctggtgattctacctggtcaagatctccaatatgttttggcaacctacgatacttccagggttgaacatgctgtggtttattacgtttacagcccaagccgctcattttcttacttttatccttttaggttgcctataaagggggtccccatcgaattacaagtggaatgcttcacatgggaccaaaaactctggtgccgtcacttctgtgtgcttgcggactcagaatctggtggacatatcactcactctgggatggtgggcatgggagtcagctgcacagtcacccgggaagatggaaccaatcgcagatagggctgctagtgaaccaatcacatgatgtcacccagacatcaggcatacccactagtgtgaaatagacatcagaattaagaaaaacgtagggtccaagtggttccccgttatggactcgctatctgtcaaccagatcttataccctgaagttcacctagatagcccgatagttaccaataagatagtagccatcctggagtatgctcgagtccctcacgcttacagcctggaggaccctacactgtgtcagaacatcaagcaccgcctaaaaaacggattttccaaccaaatgattataaacaatgtggaagttgggaatgtcatcaagtccaagcttaggagttatccggcccactctcatattccatatccaaattgtaatcaggatttatttaacatagaagacaaagagtcaacgaggaagatccgtgaactcctcaaaaaggggaattcgctgtactccaaagtcagtgataaggttttccaatgcttaagggacactaactcacggcttggcctaggctccgaattgagggaggacatcaaggagaaagttattaacttgggagtttacatgcacagctcccagtggtttgagccctttctgttttggtttacagtcaagactgagatgaggtcagtgattaaatcacaaacccatacttgccataggaggagacacacacctgtattcttcactggtagttcagttgagttgctaatctctcgtgaccttgttgctataatcagtaaagagtctcaacatgtatattacctgacatttgaactggttttgatgtattgtgatgtcatagaggggaggttaatgacagagaccgctatgactattgatgctaggtatacagagcttctaggaagagtcagatacatgtggaaactgatagatggtttcttccctgcactcgggaatccaacttatcaaattgtagccatgctggagcctctttcacttgcttacctgcagctgagggatataacagtagaactcagaggtgctttccttaaccactgctttactgaaatacatgatgttcttgaccaaaacgggttttctgatgaaggtacttatcatgagttaactgaagctctagattacattttcataactgatgacatacatctgacaggggagattttctcatttttcagaagtttcggccaccccagacttgaagcagtaacggctgctgaaaatgttaggaaatacatgaatcagcctaaagtcattgtgtatgagactctgatgaaaggtcatgccatattttgtggaatcataatcaacggctatcgtgacaggcacggaggcagttggccaccgctgaccctccccctgcatgctgcagacacaatccggaatgctcaagcttcaggtgaagggttaacacatgagcagtgcgttgataactggaaatcttttgctggagtgaaatttggctgctttatgcctcttagcctggatagtgatctgacaatgtacctaaaggacaaggcacttgctgctctccaaagggaatgggattcagtttacccgaaagagttcctgcgttacgaccctcccaagggaaccgggtcacggaggcttgtagatgttttccttaatgattcgagctttgacccatatgatgtgataatgtatgttgtaagtggagcttacctccatgaccctgagttcaacctgtcttacagcctgaaagaaaaggagatcaaggaaacaggtagactttttgctaaaatgacttacaaaatgagggcatgccaagtgattgctgaaaatctaatctcaaacgggattggcaaatattttaaggacaatgggatggccaaggatgagcacgatttgactaaggcactccacactctagctgtctcaggagtccccaaagatctcaaagaaagtcacaggggggggccagtcttaaaaacctactcccgaagcccagtccacacaagtaccaggaacgtgagagcagcaaaagggtttatagggttccctcaagtaattcggcaggaccaagacactgatcatccggagaatatggaagcttacgagacagtcagtgcatttatcacgactgatctcaagaagtactgccttaattggagatatgagaccatcagcttgtttgcacagaggctaaatgagatttacggattgccctcatttttccagtggctgcataagaggcttgagacctctgtcctgtatgtaagtgaccctcattgcccccccgaccttgacgcccatatcccgttatataaagtccccaatgatcaaatcttcattaagtaccctatgggaggtatagaagggtattgtcagaagctgtggaccatcagcaccattccctatctatacctggctgcttatgagagcggagtaaggattgcttcgttagtgcaaggggacaatcagaccatagccgtaacaaaaagggtacccagcacatggccctacaaccttaagaaacgggaagctgctagagtaactagagattactttgtaattcttaggcaaaggctacatgatattggccatcacctcaaggcaaatgagacaattgtttcatcacatttttttgtctattcaaaaggaatatattatgatgggctacttgtgtcccaatcactcaagagcatcgcaagatgtgtattctggtcagagactatagttgatgaaacaagggcagcatgcagtaatattgctacaacaatggctaaaagcatcgagagaggttatgaccgttaccttgcatattccctgaacgtcctaaaagtgatacagcaaattctgatctctcttggcttcacaatcaattcaaccatgacccgggatgtagtcatacccctcctcacaaacaacgacctcttaataaggatggcactgttgcccgctcctattggggggatgaattatctgaatatgagcaggctgtttgtcagaaacatcggtgatccagtaacatcatcaattgctgatctcaagagaatgattctcgcctcactaatgcctgaagagaccctccatcaagtaatgacacaacaaccgggggactcttcattcctagactgggctagcgacccttactcagcaaatcttgtatgtgtccagagcatcactagactcctcaagaacataactgcaaggtttgtcctgatccatagtccaaacccaatgttaaaaggattattccatgatgacagtaaagaagaggacgagggactggcggcattcctcatggacaggcatattatagtacctagggcagctcatgaaatcctggatcatagtgtcacaggggcaagagagtctattgcaggcatgctggataccacaaaaggcttgattcgagccagcatgaggaagggggggttaacctctcgagtgataaccagattgtccaattatgactatgaacaattcagagcagggatggtgctattgacaggaagaaagagaaatgtcctcattgacaaagagtcatgttcagtgcagctggcgagagctctaagaagccatatgtgggcgaggctagctcgaggacggcctatttacggccttgaggtccctgatgtactagaatctatgcgaggccaccttattcggcgtcatgagacatgtgtcatctgcgagtgtggatcagtcaactacggatggttttttgtcccctcgggttgccaactggatgatattgacaaggaaacatcatccttgagagtcccatatattggttctaccactgatgagagaacagacatgaagcttgccttcgtaagagccccaagtcgatccttgcgatctgctgttagaatagcaacagtgtactcatgggcttacggtgatgatgatagctcttggaacgaagcctggttgttggctaggcaaagggccaatgtgagcctggaggagctaagggtgatcactcccatctcaacttcgactaatttagcgcataggttgagggatcgtagcactcaagtgaaatactcaggtacatcccttgtccgagtggcgaggtataccacaatctccaacgacaatctctcatttgtcatatcagataagaaggttgatactaactttatataccaacaaggaatgcttctagggttgggtgttttagaaacattgtttcgactcgagaaagataccggatcatctaacacggtattacatcttcacgtcgaaacagattgttgcgtgatcccgatgatagatcatcccaggatacccagctcccgcaagctagagctgagggcagagctatgtaccaacccattgatatatgataatgcacctttaattgacagagatgcaacaaggctatacacccagagccataggaggcaccttgtggaatttgttacatggtccacaccccaactatatcacattttagctaagtccacagcactatctatgattgacctggtaacaaaatttgagaaggaccatatgaatgaaatttcagctctcataggggatgacgatatcaatagtttcataactgagtttctgctcatagagccaagattattcactatctacttgggccagtgtgcggccatcaattgggcatttgatgtacattatcatagaccatcagggaaatatcagatgggtgagctgttgtcatcgttcctttctagaatgagcaaaggagtgtttaaggtgcttgtcaatgctctaagccacccaaagatctacaagaaattctggcattgtggtattatagagcctatccatggtccttcacttgatgctcaaaacttgcacacaactgtgtgcaacatggtttacacatgctatatgacctacctcgacctgttgttgaatgaagagttagaagagttcacatttctcttgtgtgaaagcgacgaggatgtagtaccggacagattcgacaacatccaggcaaaacacttatgtgttctggcagatttgtactgtcaaccagggacctgcccaccaattcgaggtctaagaccggtagagaaatgtgcagttctaaccgaccatatcaaggcagaggctatgttatctccagcaggatcttcgtggaacataaatccaattattgtagaccattactcatgctctctgacttatctccggcgaggatcgatcaaacagataagattgagagttgatccaggattcattttcgacgccctcgctgaggtaaatgtcagtcagccaaagatcggcagcaacaacatctcaaatatgagcatcaaggctttcagacccccacacgatgatgttgcaaaattgctcaaagatatcaacacaagcaagcacaatcttcccatttcagggggcaatctcgccaattatgaaatccatgctttccgcagaatcgggttgaactcatctgcttgctacaaagctgttgagatatcaacattaattaggagatgccttgagccaggggaggacggcttgttcttgggtgagggatcgggttctatgttgatcacttataaagagatacttaaactaaacaagtgcttctataatagtggggtttccgccaattctagatctggtcaaagggaattagcaccctatccctccgaagttggccttgtcgaacacagaatgggagtaggtaatattgtcaaagtgctctttaacgggaggcccgaagtcacgtgggtaggcagtgtagattgcttcaatttcatagttagtaatatccctacctctagtgtggggtttatccattcagatatagagaccttgcctgacaaagatactatagagaagctagaggaattggcagccatcttatcgatggctctgctcctgggcaaaataggatcaatactggtgattaagcttatgcctttcagcggggattttgttcagggatttataagttatgtagggtctcattatagagaagtgaaccttgtataccctagatacagcaacttcatctctactgaatcttatttggttatgacagatctcaaggctaaccggctaatgaatcctgaaaagattaagcagcagataattgaatcatctgtgaggacttcacctggacttataggtcacatcctatccattaagcaactaagctgcatacaagcaattgtgggagacgcagttagtagaggtgatatcaatcctactctgaaaaaacttacacctatagagcaggtgctgatcaattgcgggttggcaattaacggacctaagctgtgcaaagaattgatccaccatgatgttgcctcagggcaagatggattgcttaattctatactcatcctctacagggagttggcaagattcaaagacaaccaaagaagtcaacaagggatgttccacgcttaccccgtattggtaagtagcaggcaacgagaacttatatctaggatcacccgcaaattctgggggcacattcttctttactccgggaacaaaaagttgataaataagtttatccagaatctcaagtccggctatctgatactagacttacaccagaatatcttcgttaagaatctatccaagtcagagaaacagattattatgacggggggtttgaaacgtgagtgggtttttaaggtaacagtcaaggagaccaaagaatggtataagttagtcggatacagtgccctgattaaggactaattggttgaactccggaaccctaatcctgccctaggtggttaggcattatttgcaatatattaaagaaaactttgaaaatacgaagtttctattcccagctttgtctggtggccggcatggtcccagcctcctcgctggcgccggctgggcaacattccgaggggaccgtcccctcggtaatggcgaatgggacgcggccggtcgatcgacgatccggctgctaacaaagcccgaaaggaagctgagttggctgctgccaccgctgagcaataactagcataaccccttggggcctctaaacgggtcttgaggggttttttgctgaaaggaggaactatatccggatcgagatcaattctgtgagcgtatggcaaacgaaggaaaaatagttatagtagccgcactcgatgggacatttcaacgtaaaccgtttaataatattttgaatcttattccattatctgaaatggtggtaaaactaactgctgtgtgtatgaaatgctttaaggaggcttccttttctaaacgattgggtgaggaaaccgagatagaaataataggaggtaatgatatgtatcaatcggtgtgtagaaagtgttacatcgactcataatattatattttttatctaaaaaactaaaaataaacattgattaaattttaatataatacttaaaaatggatgttgtgtcgttagataaaccgtttatgtattttgaggaaattgataatgagttagattacgaaccagaaagtgcaaatgaggtcgcaaaaaaactgccgtatcaaggacagttaaaactattactaggagaattattttttcttagtaagttacagcgacacggtatattagatggtgccaccgtagtgtatataggatctgctcccggtacacatatacgttatttgagagatcatttctataatttaggagtgatcccgaaaggaagctgagttggctgctgccaccgctgagcaataactagcataaccccttggggcctctaaacgggtcttgaggggttttttgctgaaaggaggaacgcgcctgatgcggtattttctccttacgcatctgtgcggtatttcacaccgcatatatggtgcactctcagtacaatctgctctgatgccgcatagttaagccagccccgacacccgccaacacccgctgacgcgccctgacgggcttgtctgctcccggcatccgcttacagacaagctgtgaccgtctccgggagctgcatgtgtcagaggttttcaccgtcatcaccgaaacgcgcgagacgaaagggcctcgtgatacgcctatttttataggttaatgtcatgataataatggtttcttagacgtcaggtggcacttttcggggaaatgtgcgcggaacccctatttgtttatttttctaaatacattcaaatatgtatccgctcatgagacaataaccctgataaatgcttcaataatattgaaaaaggaagagtatgagtattcaacatttccgtgtcgcccttattcccttttttgcggcattttgccttcctgtttttgctcacccagaaacgctggtgaaagtaaaagatgctgaagatcagttgggtgcacgagtgggttacatcgaactggatctcaacagcggtaagatccttgagagttttcgccccgaagaacgttttccaatgatgagcacttttaaagttctgctatgtggcgcggtattatcccgtattgacgccgggcaagagcaactcggtcgccgcatacactattctcagaatgacttggttgagtactcaccagtcacagaaaagcatcttacggatggcatgacagtaagagaattatgcagtgctgccataaccatgagtgataacactgcggccaacttacttctgacaacgatcggaggaccgaaggagctaaccgcttttttgcacaacatgggggatcatgtaactcgccttgatcgttgggaaccggagctgaatgaagccataccaaacgacgagcgtgacaccacgatgcctgtagcaatggcaacaacgttgcgcaaactattaactggcgaactacttactctagcttcccggcaacaattaatagactggatggaggcggataaagttgcaggaccacttctgcgctcggcccttccggctggctggtttattgctgataaatctggagccggtgagcgtgggtctcgcggtatcattgcagcactggggccagatggtaagccctcccgtatcgtagttatctacacgacggggagtcaggcaactatggatgaacgaaatagacagatcgctgagataggtgcctcactgattaagcattggtaactgtcagaccaagtttactcatatatactttagattgatttaaaacttcatttttaatttaaaaggatctaggtgaagatcctttttgataatctcatgaccaaaatcccttaacgtgagttttcgttccactgagcgtcagaccccgtagaaaagatcaaaggatcttcttgagatcctttttttctgcgcgtaatctgctgcttgcaaacaaaaaaaccaccgctaccagcggtggtttgtttgccggatcaagagctaccaactctttttccgaaggtaactggcttcagcagagcgcagataccaaatactgtccttctagtgtagccgtagttaggccaccacttcaagaactctgtagcaccgcctacatacctcgctctgctaatcctgttaccagtggctgctgccagtggcgataagtcgtgtcttaccgggttggactcaagacgatagttaccggataaggcgcagcggtcgggctgaacggggggttcgtgcacacagcccagcttggagcgaacgacctacaccgaactgagatacctacagcgtgagcattgagaaagcgccacgcttcccgaagggagaaaggcggacaggtatccggtaagcggcagggtcggaacaggagagcgcacgagggagcttccagggggaaacgcctggtatctttatagtcctgtcgggtttcgccacctctgacttgagcgtcgatttttgtgatgctcgtcaggggggcggagcctatggaaaaacgccagcaacgcggcctttttacggttcctggccttttgctggccttttgctcacatgttctttcctgcgttatcccctgattctgtggataaccgtattaccgcctttgagtgagctgataccgctcgccgcagccgaacgaccgagcgcagcgagtcagtgagcgaggaagcggaagagcgcccaatacgcaaaccgcctctccccgcgcgttggccgattcattaatgcagctggcacgacaggtttcccgactggaaagcgggcagtgagcgcaacgcaattaatgtgagttagctcactcattaggcaccccaggctttacactttatgcttccggctcgtatgttgtgtggaattgtgagcggataacaatttcacacaggaaacagctatgaccatgattacgccaagcttacgcgtcctggcattatgcccagtacatgaccttatgggactttcctacttggcagtacatctacgtattagtcatcgctattaccatggtgatgcggttttggcagtacatcaatgggcgtggatagcggtttgactcacggggatttccaagtctccaccccattgacgtcaatgggagtttgttttggcaccaaaatcaacgggactttccaaaatgtcgtaacaactccgccccattgacgcaaatgggcggtaggcgtgtacggtgggaggtctatataagcagagctcgtttagtgaaccgtgg

SEQ ID NO: 30 - DNA, 11023 bp, Artificial Sequence
  s4-1BBL-TriXVIII in pCEP4 vector
gttgacattgattattgactagttattaatagtaatcaattacggggtcattagttcatagcccatatatggagttccgcgttacataacttacggtaaatggcccgcctggctgaccgcccaacgacccccgcccattgacgtcaataatgacgtatgttcccatagtaacgccaatagggactttccattgacgtcaatgggtggagtatttacggtaaactgcccacttggcagtacatcaagtgtatcatatgccaagtccgccccctattgacgtcaatgacggtaaatggcccgcctggcattatgcccagtacatgaccttacgggactttcctacttggcagtacatctacgtattagtcatcgctattaccatggtgatgcggttttggcagtacaccaatgggcgtggatagcggtttgactcacggggatttccaagtctccaccccattgacgtcaatgggagtttgttttggcaccaaaatcaacgggactttccaaaatgtcgtaataaccccgccccgttgacgcaaatgggcggtaggcgtgtacggtgggaggtctatataagcagagctcgtttagtgaaccgtcagatctctagaagctgggtaccagctgctagcaagcttgccaccatgcccatggggtctctgcaaccgctggccaccttgtacctgctggggatgctggtcgcttcctgcctcggaggctctggctccaactggagccacccccagttcgagaagggaggttctgggggccatcaccatcaccatcacggcggttcagggggaggcgttcgactttgggctacaagacaggcaatgctgggccaggtccatgaggttcctgaggggtggctcattttcgtggccgagcaggaggagctgtatgttcgcgtgcaaaacggctttaggaaggtccagctggaagcgcggacacctttgcccaggggaaccgataacgagggatccttggacctgcggcagggcatgtttgcgcagctggtggcccaaaatgttctgctgatcgatgggcccctgagctggtacagtgacccaggcctggcaggcgtgtccctgacggggggcctgagctacaaagaggacacgaaggagctggtggtggccaaggctggagtctactatgtcttctttcaactagagctgcggcgcgtggtggccggcgagggctcaggctccgtttcacttgcgctgcacctgcagccactgcgctctgctgctggggccgccgccctggctttgaccgtggacctgccacccgcctcctccgaggctcggaactcggccttcggtttccagggccgcttgctgcacctgagtgccggccagcgcctgggcgtccatcttcacactgaggccagggcacgccatgcctggcagcttacccagggcgccacagtcttgggactcttccgggtgacccccgaaatcccagccggactcccttcaccgaggtcggaataagcggccgcagatccagacatgataagatacattgatgagtttggacaaaccacaactagaatgcagtgaaaaaaatgctttatttgtgaaatttgtgatgctattgctttatttgtaaccattataagctgcaataaacaagttaacaacaacaattgcattcattttatgtttcaggttcagggggaggtgtgggaggttttttaaagcaagtaaaacctctacaaatgtggtatggctgattatgatccggctgcctcgcgcgtttcggtgatgacggtgaaaacctctgacacatgcagctcccggagacggtcacagcttgtctgtaagcggatgccgggagcagacaagcccgtcaggcgtcagcgggtgttggcgggtgtcggggcgcagccatgaggtcgactctagaggatcgatgccccgccccggacgaactaaacctgactacgacatctctgccccttcttcgcggggcagtgcatgtaatcccttcagttggttggtacaacttgccaactgggccctgttccacatgtgacacggggggggaccaaacacaaaggggttctctgactgtagttgacatccttataaatggatgtgcacatttgccaacactgagtggctttcatcctggagcagactttgcagtctgtggactgcaacacaacattgcctttatgtgtaactcttggctgaagctcttacaccaatgctgggggacatgtacctcccaggggcccaggaagactacgggaggctacaccaacgtcaatcagaggggcctgtgtagctaccgataagcggaccctcaagagggcattagcaatagtgtttataaggcccccttgttaaccctaaacgggtagcatatgcttcccgggtagtagtatatactatccagactaaccctaattcaatagcatatgttacccaacgggaagcatatgctatcgaattagggttagtaaaagggtcctaaggaacagcgatatctcccaccccatgagctgtcacggttttatttacatggggtcaggattccacgagggtagtgaaccattttagtcacaagggcagtggctgaagatcaaggagcgggcagtgaactctcctgaatcttcgcctgcttcttcattctccttcgtttagctaatagaataactgctgagttgtgaacagtaaggtgtatgtgaggtgctcgaaaacaaggtttcaggtgacgcccccagaataaaatttggacggggggttcagtggtggcattgtgctatgacaccaatataaccctcacaaaccccttgggcaataaatactagtgtaggaatgaaacattctgaatatctttaacaatagaaatccatggggtggggacaagccgtaaagactggatgtccatctcacacgaatttatggctatgggcaacacataatcctagtgcaatatgatactggggttattaagatgtgtcccaggcagggaccaagacaggtgaaccatgttgttacactctatttgtaacaaggggaaagagagtggacgccgacagcagcggactccactggttgtctctaacacccccgaaaattaaacggggctccacgccaatggggcccataaacaaagacaagtggccactcttttttttgaaattgtggagtgggggcacgcgtcagcccccacacgccgccctgcggttttggactgtaaaataagggtgtaataacttggctgattgtaaccccgctaaccactgcggtcaaaccacttgcccacaaaaccactaatggcaccccggggaatacctgcataagtaggtgggcgggccaagataggggcgcgattgctgcgatctggaggacaaattacacacacttgcgcctgagcgccaagcacagggttgttggtcctcatattcacgaggtcgctgagagcacggtgggctaatgttgccatgggtagcatatactacccaaatatctggatagcatatgctatcctaatctatatctgggtagcataggctatcctaatctatatctgggtagcatatgctatcctaatctatatctgggtagtatatgctatcctaatttatatctgggtagcataggctatcctaatctatatctgggtagcatatgctatcctaatctatatctgggtagtatatgctatcctaatctgtatccgggtagcatatgctatcctaatagagattagggtagtatatgctatcctaatttatatctgggtagcatatactacccaaatatctggatagcatatgctatcctaatctatatctgggtagcatatgctatcctaatctatatctgggtagcataggctatcctaatctatatctgggtagcatatgctatcctaatctatatctgggtagtatatgctatcctaatttatatctgggtagcataggctatcctaatctatatctgggtagcatatgctatcctaatctatatctgggtagtatatgctatcctaatctgtatccgggtagcatatgctatcctcatgcatatacagtcagcatatgatacccagtagtagagtgggagtgctatcctttgcatatgccgccacctcccaagggggcgtgaattttcgctgcttgtccttttcctgctggttgctcccattcttaggtgaatttaaggaggccaggctaaagccgtcgcatgtctgattgctcaccaggtaaatgtcgctaatgttttccaacgcgagaaggtgttgagcgcggagctgagtgacgtgacaacatgggtatgcccaattgccccatgttgggaggacgaaaatggtgacaagacagatggccagaaatacaccaacagcacgcatgatgtctactggggatttattctttagtgcgggggaatacacggcttttaatacgattgagggcgtctcctaacaagttacatcactcctgcccttcctcaccctcatctccatcacctccttcatctccgtcatctccgtcatcaccctccgcggcagccccttccaccataggtggaaaccagggaggcaaatctactccatcgtcaaagctgcacacagtcaccctgatattgcaggtaggagcgggctttgtcataacaaggtccttaatcgcatccttcaaaacctcagcaaatatatgagtttgtaaaaagaccatgaaataacagacaatggactcccttagcgggccaggttgtgggccgggtccaggggccattccaaaggggagacgactcaatggtgtaagacgacattgtggaatagcaagggcagttcctcgccttaggttgtaaagggaggtcttactacctccatatacgaacacaccggcgacccaagttccttcgtcggtagtcctttctacgtgactcctagccaggagagctcttaaaccttctgcaatgttctcaaatttcgggttggaacctccttgaccacgatgctttccaaaccaccctccttttttgcgcctgcctccatcaccctgaccccggggtccagtgcttgggccttctcctgggtcatctgcggggccctgctctatcgctcccgggggcacgtcaggctcaccatctgggccaccttcttggtggtattcaaaataatcggcttcccctacagggtggaaaaatggccttctacctggagggggcctgcgcggtggagacccggatgatgatgactgactactgggactcctgggcctcttttctccacgtccacgacctctccccctggctctttcacgacttccccccctggctctttcacgtcctctaccccggcggcctccactacctcctcgaccccggcctccactacctcctcgaccccggcctccactgcctcctcgaccccggcctccacctcctgctcctgcccctcctgctcctgcccctcctcctgctcctgcccctcctgcccctcctgctcctgcccctcctgcccctcctgctcctgcccctcctgcccctcctgctcctgcccctcctgcccctcctcctgctcctgcccctcctgcccctcctcctgctcctgcccctcctgcccctcctgctcctgcccctcctgcccctcctgctcctgcccctcctgcccctcctgctcctgcccctcctgctcctgcccctcctgctcctgcccctcctgctcctgcccctcctgcccctcctgcccctcctcctgctcctgcccctcctgctcctgcccctcctgcccctcctgcccctcctgctcctgcccctcctcctgctcctgcccctcctgcccctcctgcccctcctcctgctcctgcccctcctgcccctcctcctgctcctgcccctcctcctgctcctgcccctcctgcccctcctgcccctcctcctgctcctgcccctcctgcccctcctcctgctcctgcccctcctcctgctcctgcccctcctgcccctcctgcccctcctcctgctcctgcccctcctcctgctcctgcccctcctgcccctcctgcccctcctgcccctcctcctgctcctgcccctcctcctgctcctgcccctcctgctcctgcccctcccgctcctgctcctgctcctgttccaccgtgggtccctttgcagccaatgcaacttggacgtttttggggtctccggacaccatctctatgtcttggccctgatcctgagccgcccggggctcctggtcttccgcctcctcgtcctcgtcctcttccccgtcctcgtccatggttatcaccccctcttctttgaggtccactgccgccggagccttctggtccagatgtgtctcccttctctcctaggccatttccaggtcctgtacctggcccctcgtcagacatgattcacactaaaagagatcaatagacatctttattagacgacgctcagtgaatacagggagtgcagactcctgccccctccaacagcccccccaccctcatccccttcatggtcgctgtcagacagatccaggtctgaaaattccccatcctccgaaccatcctcgtcctcatcaccaattactcgcagcccggaaaactcccgctgaacatcctcaagatttgcgtcctgagcctcaagccaggcctcaaattcctcgtccccctttttgctggacggtagggatggggattctcgggacccctcctcttcctcttcaaggtcaccagacagagatgctactggggcaacggaagaaaagctgggtgcggcctgtgaggatcagcttatcgatgataagctgtcaaacatgagaattcttgaagacgaaagggcctcgtgatacgcctatttttataggttaatgtcatgataataatggtttcttagacgtcaggtggcacttttcggggaaatgtgcgcggaacccctatttgtttatttttctaaatacattcaaatatgtatccgctcatgagacaataaccctgataaatgcttcaataatattgaaaaaggaagagtatgagtattcaacatttccgtgtcgcccttattcccttttttgcggcattttgccttcctgtttttgctcacccagaaacgctggtgaaagtaaaagatgctgaagatcagttgggtgcacgagtgggttacatcgaactggatctcaacagcggtaagatccttgagagttttcgccccgaagaacgttttccaatgatgagcacttttaaagttctgctatgtggcgcggtattatcccgtgttgacgccgggcaagagcaactcggtcgccgcatacactattctcagaatgacttggttgagtactcaccagtcacagaaaagcatcttacggatggcatgacagtaagagaattatgcagtgctgccataaccatgagtgataacactgcggccaacttacttctgacaacgatcggaggaccgaaggagctaaccgcttttttgcacaacatgggggatcatgtaactcgccttgatcgttgggaaccggagctgaatgaagccataccaaacgacgagcgtgacaccacgatgcctgcagcaatggcaacaacgttgcgcaaactattaactggcgaactacttactctagcttcccggcaacaattaatagactggatggaggcggataaagttgcaggaccacttctgcgctcggcccttccggctggctggtttattgctgataaatctggagccggtgagcgtgggtctcgcggtatcattgcagcactggggccagatggtaagccctcccgtatcgtagttatctacacgacggggagtcaggcaactatggatgaacgaaatagacagatcgctgagataggtgcctcactgattaagcattggtaactgtcagaccaagtttactcatatatactttagattgatttaaaacttcatttttaatttaaaaggatctaggtgaagatcctttttgataatctcatgaccaaaatcccttaacgtgagttttcgttccactgagcgtcagaccccgtagaaaagatcaaaggatcttcttgagatcctttttttctgcgcgtaatctgctgcttgcaaacaaaaaaaccaccgctaccagcggtggtttgtttgccggatcaagagctaccaactctttttccgaaggtaactggcttcagcagagcgcagataccaaatactgtccttctagtgtagccgtagttaggccaccacttcaagaactctgtagcaccgcctacatacctcgctctgctaatcctgttaccagtggctgctgccagtggcgataagtcgtgtcttaccgggttggactcaagacgatagttaccggataaggcgcagcggtcgggctgaacggggggttcgtgcacacagcccagcttggagcgaacgacctacaccgaactgagatacctacagcgtgagctatgagaaagcgccacgcttcccgaagggagaaaggcggacaggtatccggtaagcggcagggtcggaacaggagagcgcacgagggagcttccagggggaaacgcctggtatctttatagtcctgtcgggtttcgccacctctgacttgagcgtcgatttttgtgatgctcgtcaggggggcggagcctatggaaaaacgccagcaacgcggcctttttacggttcctggccttttgctggccttgaagctgtccctgatggtcgtcatctacctgcctggacagcatggcctgcaacgcgggcatcccgatgccgccggaagcgagaagaatcataatggggaaggccatccagcctcgcgtcgcgaacgccagcaagacgtagcccagcgcgtcggccccgagatgcgccgcgtgcggctgctggagatggcggacgcgatggatatgttctgccaagggttggtttgcgcattcacagttctccgcaagaattgattggctccaattcttggagtggtgaatccgttagcgaggtgccgccctgcttcatccccgtggcccgttgctcgcgtttgctggcggtgtccccggaagaaatatatttgcatgtctttagttctatgatgacacaaaccccgcccagcgtcttgtcattggcgaattcgaacacgcagatgcagtcggggcggcgcggtccgaggtccacttcgcatattaaggtgacgcgtgtggcctcgaacaccgagcgaccctgcagcgacccgcttaacagcgtcaacagcgtgccgcagatcccggggggcaatgagatatgaaaaagcctgaactcaccgcgacgtctgtcgagaagtttctgatcgaaaagttcgacagcgtctccgacctgatgcagctctcggagggcgaagaatctcgtgctttcagcttcgatgtaggagggcgtggatatgtcctgcgggtaaatagctgcgccgatggtttctacaaagatcgttatgtttatcggcactttgcatcggccgcgctcccgattccggaagtgcttgacattggggaattcagcgagagcctgacctattgcatctcccgccgtgcacagggtgtcacgttgcaagacctgcctgaaaccgaactgcccgctgttctgcagccggtcgcggaggccatggatgcgatcgctgcggccgatcttagccagacgagcgggttcggcccattcggaccgcaaggaatcggtcaatacactacatggcgtgatttcatatgcgcgattgctgatccccatgtgtatcactggcaaactgtgatggacgacaccgtcagtgcgtccgtcgcgcaggctctcgatgagctgatgctttgggccgaggactgccccgaagtccggcacctcgtgcacgcggatttcggctccaacaatgtcctgacggacaatggccgcataacagcggtcattgactggagcgaggcgatgttcggggattcccaatacgaggtcgccaacatcttcttctggaggccgtggttggcttgtatggagcagcagacgcgctacttcgagcggaggcatccggagcttgcaggatcgccgcggctccgggcgtatatgctccgcattggtcttgaccaactctatcagagcttggttgacggcaatttcgatgatgcagcttgggcgcagggtcgatgcgacgcaatcgtccgatccggagccgggactgtcgggcgtacacaaatcgcccgcagaagcgcggccgtctggaccgatggctgtgtagaagtactcgccgatagtggaaaccgacgccccagcactcgtccggatcgggagatgggggaggctaactgaaacacggaaggagacaataccggaaggaacccgcgctatgacggcaataaaaagacagaataaaacgcacgggtgttgggtcgtttgttcataaacgcggggttcggtcccagggctggcactctgtcgataccccaccgagaccccattggggccaatacgcccgcgtttcttccttttccccaccccaccccccaagttcgggtgaaggcccagggctcgcagccaacgtcggggcggcaggccctgccatagccactggccccgtgggttagggacggggtcccccatggggaatggtttatggttcgtgggggttattattttgggcgttgcgtggggtcaggtccacgactggactgagcagacagacccatggtttttggatggcctgggcatggaccgcatgtactggcgcgacacgaacaccgggcgtctgtggctgccaaacacccccgacccccaaaaaccaccgcgcggatttctggcgtgccaagctagtcgaccaattctcatgtttgacagcttatcatcgcagatccgggcaacgttgttgccattgctgcaggcgcagaactggtaggtatggaagatctatacattgaatcaatattggcaattagccatattagtcattggttatatagcataaatcaatattggctattggccattgcatacgttgtatctatatcataatatgtacatttatattggctcatgtccaatatgaccgccat

SEQ ID NO: 31 - DNA, 20484 bp, Artificial Sequence
  Vector with soluble s4-1BBL ectodomain construct
accaaacaaagttgggtaaggatagttcaatcaatgatcatcttctagtgcacttaggattcaagatcctattatcagggacaagagcaggattagggatatctcgaggcgcgtgccaccatgcccatggggtctctgcaaccgctggccaccttgtacctgctggggatgctggtcgcttcctgcctcggaggcgttcgactttgggctacaagacaggcaatgctgggccaggtccatgaggttcctgaggggtggctcattttcgtggccgagcaggaggagctgtatgttcgcgtgcaaaacggctttaggaaggtccagctggaagcgcggacacctttgcccaggggaaccgataacgagggatccttggacctgcggcagggcatgtttgcgcagctggtggcccaaaatgttctgctgatcgatgggcccctgagctggtacagtgacccaggcctggcaggcgtgtccctgacggggggcctgagctacaaagaggacacgaaggagctggtggtggccaaggctggagtctactatgtcttctttcaactagagctgcggcgcgtggtggccggcgagggctcaggctccgtttcacttgcgctgcacctgcagccactgcgctctgctgctggggccgccgccctggctttgaccgtggacctgccacccgcctcctccgaggctcggaactcggccttcggtttccagggccgcttgctgcacctgagtgccggccagcgcctgggcgtccatcttcacactgaggccagggcacgccatgcctggcagcttacccagggcgccacagtcttgggactcttccgggtgacccccgaaatcccagccggactcccttcaccgaggtcggaataaacgcgccatccatcattgttataaaaaacttaggattcaagatcctattatcagggacaagagcaggattagggatatccgagatggccacacttttaaggagcttagcattgttcaaaagaaacaaggacaaaccacccattacatcaggatccggtggagccatcagaggaatcaaacacattattatagtaccaatccctggagattcctcaattaccactcgatccagacttctggaccggttggtcaggttaattggaaacccggatgtgagcgggcccaaactaacaggggcactaataggtatattatccttatttgtggagtctccaggtcaattgattcagaggatcaccgatgaccctgacgttagcataaggctgttagaggttgtccagagtgaccagtcacaatctggccttaccttcgcatcaagaggtaccaacatggaggatgaggcggaccaatacttttcacatgatgatccaattagtagtgatcaatccaggttcggatggttcgagaacaaggaaatctcagatattgaagtgcaagaccctgagggattcaacatgattctgggtaccatcctagcccaaatttgggtcttgctcgcaaaggcggttacggccccagacacggcagctgattcggagctaagaaggtggataaagtacacccaacaaagaagggtggttggtgaatttagattggagagaaaatggttggatgtggtgaggaacaggattgccgaggacctctccttacgccgattcatggtcgctctaatcctggatatcaagagaacacccggaaacaaacccaggattgctgaaatgatatgtgacattgatacatatatcgtagaggcaggattagccagttttatcctgactattaagtttgggatagaaactatgtatcctgctcttggactgcatgaatttgctggtgagttatccacacttgagtccttgatgaacctttaccagcaaatgggggaaactgcaccctacatggtaatcctggagaactcaattcagaacaagttcagtgcaggatcataccctctgctctggagctatgccatgggagtaggagtggaacttgaaaactccatgggaggtttgaactttggccgatcttactttgatccagcatattttagattagggcaagagatggtaaggaggtcagctggaaaggtcagttccacattggcatctgaactcggtatcactgccgaggatgcaaggcttgtttcagagattgcaatgcatactactgaggacaagatcagtagagcggttggacccagacaagcccaagtatcatttctacacggtgatcaaagtgagaatgagctaccgagattggggggcaaggaagataggagggtcaaacagagtcgaggagaagccagggagagctacagagaaaccgggcccagcagagcaagtgatgcgagagctgcccatcttccaaccggcacacccctagacattgacactgcaacggagtccagccaagatccgcaggacagtcgaaggtcagctgacgccctgcttaggctgcaagccatggcaggaatctcggaagaacaaggctcagacacggacacccctatagtgtacaatgacagaaatcttctagactaggtgcgagaggccgagggccagaacaacatccgcctaccctccatcattgttataaaaaacttaggaaccaggtccacacagccgccagcccatcaaccatccactcccacgattggagccaatggcagaagagcaggcacgccatgtcaaaaacggactggaatgcatccgggctctcaaggccgagcccatcggctcactggccatcgaggaagctatggcagcatggtcagaaatatcagacaacccaggacaggagcgagccacctgcagggaagagaaggcaggcagttcgggtctcagcaaaccatgcctctcagcaattggatcaactgaaggcggtgcacctcgcatccgcggtcagggacctggagagagcgatgacgacgctgaaactttgggaatccccccaagaaatctccaggcatcaagcactgggttacagtgttattacgtttatgatcacagcggtgaagcggttaagggaatccaagatgctgactctatcatggttcaatcaggccttgatggtgatagcaccctctcaggaggagacaatgaatctgaaaacagcgatgtggatattggcgaacctgataccgagggatatgctatcactgaccggggatctgctcccatctctatggggttcagggcttctgatgttgaaactgcagaaggaggggagatccacgagctcctgagactccaatccagaggcaacaactttccgaagcttgggaaaactctcaatgttcctccgcccccggaccccggtagggccagcacttccgggacacccattaaaaagggcacagacgcgagattagcctcatttggaacggagatcgcgtctttattgacaggtggtgcaacccaatgtgctcgaaagtcaccctcggaaccatcagggccaggtgcacctgcggggaatgtccccgagtgtgtgagcaatgccgcactgatacaggagtggacacccgaatctggtaccacaatctccccgagatcccagaataatgaagaagggggagactattatgatgatgagctgttctctgatgtccaagatattaaaacagccttggccaaaatacacgaggataatcagaagataatctccaagctagaatcactgctgttattgaagggagaagttgagtcaattaagaagcagatcaacaggcaaaatatcagcatatccaccctggaaggacacctctcaagcatcatgatcgccattcctggacttgggaaggatcccaacgaccccactgcagatgtcgaaatcaatcccgacttgaaacccatcataggcagagattcaggccgagcactggccgaagttctcaagaaacccgttgccagccgacaactccaaggaatgacaaatggacggaccagttccagaggacagctgctgaaggaatttcagctaaagccgatcgggaaaaagatgagctcagccgtcgggtttgttcctgacaccggccctgcatcacgcagtgtaatccgctccattataaaatccagccggctagaggaggatcggaagcgttacctgatgactctccttgatgatatcaaaggagccaatgatcttgccaagttccaccagatgctgatgaagataataatgaagtagctacagctcaacttacctgccaaccccatgccagtcgacccaactagtacaacctaaatccattataaaaaacttaggagcaaagtgattgcctcccaagttccacaatgacagagacctacgacttcgacaagtcggcatgggacatcaaagggtcgatcgctccgatacaacccaccacctacagtgatggcaggctggtgccccaggtcagagtcatagatcctggtctaggcgacaggaaggatgaatgctttatgtacatgtttctgctgggggttgttgaggacagcgattccctagggcctccaatcgggcgagcatttgggtccctgcccttaggtgttggcagatccacagcaaagcccgaaaaactcctcaaagaggccactgagcttgacatagttgttagacgtacagcagggctcaatgaaaaactggtgttctacaacaacaccccactaactctcctcacaccttggagaaaggtcctaacaacagggagtgtcttcaacgcaaaccaagtgtgcaatgcggttaatctgataccgctcgataccccgcagaggttccgtgttgtttatatgagcatcacccgtctttcggataacgggtattacaccgttcctagaagaatgctggaattcagatcggtcaatgcagtggccttcaacctgctggtgacccttaggattgacaaggcgataggccctgggaagatcatcgacaatacagagcaacttcctgaggcaacatttatggtccacatcgggaacttcaggagaaagaagagtgaagtctactctgccgattattgcaaaatgaaaatcgaaaagatgggcctggtttttgcacttggtgggatagggggcaccagtcttcacattagaagcacaggcaaaatgagcaagactctccatgcacaactcgggttcaagaagaccttatgttacccgctgatggatatcaatgaagaccttaatcgattactctggaggagcagatgcaagatagtaagaatccaggcagttttgcagccatcagttcctcaagaattccgcatttacgacgacgtgatcataaatgatgaccaaggactattcaaagttctgtagaccgtagtgcccagcaatgcccgaaaacgacccccctcacaatgacagccagaaggcccggacaaaaaagccccctccgaaagactccacggaccaagcgagaggccagccagcagccgacggcaagcgcgaacaccaggcggccccagcacagaacagccccgacacaaggccaccaccagccaccccaatctgcatcctcctcgtgggacccccgaggaccaacccccaaggctgcccccgatccaaaccaccaaccgcatccccaccacccccgggaaagaaacccccagcaattggaaggcccctccccctcttcctcaacacaagaactccacaaccgaaccgcacaagcgaccgaggtgacccaaccgcaggcatccgactccctagacagatcctctctccccggcaaactaaacaaaacttagggccaaggaacatacacacccaacagaacccagaccccggcccacggcgccgcgcccccaacccccgacaaccagagggagcccccaaccaatcccgccggctcccccggtgcccacaggcagggacaccaacccccgaacagacccagcacccaaccatcgacaatccaagacgggggggcccccccaaaaaaaggcccccaggggccgacagccagcaccgcgaggaagcccacccaccccacacacgaccacggcaaccaaaccagaacccagaccaccctgggccaccagctcccagactcggccatcaccccgcagaaaggaaaggccacaacccgcgcaccccagccccgatccggcggggagccacccaacccgaaccagcacccaagagcgatccccgaaggacccccgaaccgcaaaggacaccagtatcccacagcctctccaagtcccccggtctcctcctcttctcgaagggaccaaaagatcaatccaccacacccgacgacactcaactccccacccctaaaggagacaccgggaatcccagaatcaagactcatccaatgtccatcatgggtctcaaggtgaacgtctctgccatattcatggcagtactgttaactctccaaacacccaccggtcaaatccattggggcaatctctctaagataggggtggtaggaataggaagtgcaagctacaaagttatgactcgttccagccatcaatcattagtcataaaattaatgcccaatataactctcctcaataactgcacgagggtagagattgcagaatacaggagactactgagaacagttttggaaccaattagagatgcacttaatgcaatgacccagaatataagaccggttcagagtgtagcttcaagtaggagacacaagagatttgcgggagtagtcctggcaggtgcggccctaggcgttgccacagctgctcagataacagccggcattgcacttcaccagtccatgctgaactctcaagccatcgacaatctgagagcgagcctggaaactactaatcaggcaattgaggcaatcagacaagcagggcaggagatgatattggctgttcagggtgtccaagactacatcaataatgagctgataccgtctatgaaccaactatcttgtgatttaatcggccagaagctcgggctcaaattgctcagatactatacagaaatcctgtcattatttggccccagtttacgggaccccatatctgcggagatatctatccaggctttgagctatgcgcttggaggagacatcaataaggtgttagaaaagctcggatacagtggaggtgatttactgggcatcttagagagcggaggcatcaaggcccggataactcacgtcgacacagagtcctacttcattgtcctcagtatagcctatccgacgctgtccgagattaagggggtgattgtccaccggctagagggggtctcgtacaacataggctctcaagagtggtataccactgtgcccaagtatgttgcaacccaagggtaccttatctcgaattttgatgagtcatcgtgtactttcatgccagaggggactgtgtgcagccaaaatgccttgtacccgatgagtcctctgctccaagaatgcctccgggggtacaccaagtcctgtgctcgtacactcgtatccgggtcttttgggaaccggttcattttatcacaagggaacctaatagccaattgtgcatcaatcctttgcaagtgttacacaacaggaacgatcattaatcaagaccctgacaagatcctaacatacattgctgccgatcactgcccggtagtcgaggtgaacggcgtgatcatccaagtcgggagcaggaggtatccagacgctgtgtacttgcacagaattgacctcggtcctcccatatcattggagaggttggacgtagggacaaatctggggaatgcaattgctaagttggaggatgccaaggaattgttggagtcatcggaccagatattgaggagtatgaaaggtttatcgagcactagcatagtctacatcctgattgcagtgtgtcttggagggttgatagggatccccgctttaatatgttgctgcagggggcgttgtaacaaaaagggagaacaagttggtatgtcaagaccaggcctaaagcctgatcttacgggaacatcaaaatcctatgtaaggtcgctctgatcctctacaactcttgaaacacaaatgtcccacaagtctcctcttcgtcatcaagcaaccaccgcacccagcatcaagcccacctgaaattatctccggcttccctctggccgaacaatatcggtagttaattaaaacttagggtgcaagatcatccacaatgtcaccacaacgagaccggataaatgccttctacaaagataacccccatcccaagggaagtaggatagtcattaacagagaacatcttatgattgatagaccttatgttttgctggctgttctgtttgtcatgtttctgagcttgatcgggttgctagccattgcaggcattagacttcatcgggcagccatctacaccgcagagatccataaaagcctcagcaccaatctagatgtaactaactcaatcgagcatcaggtcaaggacgtgctgacaccactcttcaaaatcatcggtgatgaagtgggcctgaggacacctcagagattcactgacctagtgaaattcatctctgacaagatcaagttccttaatccggatagggagtacgacttcagagatctcacttggtgtatcaacccgccagagagaatcaaattggattatgatcaatactgtgcagatgtggctgctgaagagctcatgaatgcattggtgaactcaactctactggagaccagaacaaccaatcagttcctagctgtctcaaagggaaactgctcagggcccactacaatcagaggtcaattctcaaacatgtcgctgtccctgttagacttgtatttaggtcgaggttacaatgtgtcatctatagtcactatgacatcccagggaatgtatgggggaacttacctagtggaaaagcctaatctgagcagcaaaaggtcagagttgtcacaactgagcatgtaccgagtgtttgaagtaggtgttatcagaaatccgggtttgggggctccggtgttccatatgacaaactatcttgagcaaccagtcagtaatgatctcagcaactgtatggtggctttgggggagctcaaactcgcagccctttgtcacggggaagattctatcacaattccctatcagggatcagggaaaggtgtcagcttccagctcgtcaagctaggtgtctggaaatccccaaccgacatgcaatcctgggtccccttatcaacggatgatccagtgatagacaggctttacctctcatctcacagaggtgttatcgctgacaatcaagcaaaatgggctgtcccgacaacacgaacagatgacaagttgcgaatggagacatgcttccaacaggcgtgtaagggtaaaatccaagcactctgcgagaatcccgagtgggcaccattgaaggataacaggattccttcatacggggtcttgtctgttgatctgagtctgacagttgagcttaaaatcaaaattgcttcgggattcgggccattgatcacacacggttcagggatggacctatacaaatccaaccacaacaatgtgtattggctgactatcccgccaatgaagaacctagccttaggtgtaatcaacacattggagtggataccgagattcaaggttagtccctacctcttcactgtcccaattaaggaagcaggcgaagactgccatgccccaacatacctacctgcggaggtggatggtgatgtcaaactcagttccaatctggtgattctacctggtcaagatctccaatatgttttggcaacctacgatacttccagggttgaacatgctgtggtttattacgtttacagcccaagccgctcattttcttacttttatccttttaggttgcctataaagggggtccccatcgaattacaagtggaatgcttcacatgggaccaaaaactctggtgccgtcacttctgtgtgcttgcggactcagaatctggtggacatatcactcactctgggatggtgggcatgggagtcagctgcacagtcacccgggaagatggaaccaatcgcagatagggctgctagtgaaccaatcacatgatgtcacccagacatcaggcatacccactagtgtgaaatagacatcagaattaagaaaaacgtagggtccaagtggttccccgttatggactcgctatctgtcaaccagatcttataccctgaagttcacctagatagcccgatagttaccaataagatagtagccatcctggagtatgctcgagtccctcacgcttacagcctggaggaccctacactgtgtcagaacatcaagcaccgcctaaaaaacggattttccaaccaaatgattataaacaatgtggaagttgggaatgtcatcaagtccaagcttaggagttatccggcccactctcatattccatatccaaattgtaatcaggatttatttaacatagaagacaaagagtcaacgaggaagatccgtgaactcctcaaaaaggggaattcgctgtactccaaagtcagtgataaggttttccaatgcttaagggacactaactcacggcttggcctaggctccgaattgagggaggacatcaaggagaaagttattaacttgggagtttacatgcacagctcccagtggtttgagccctttctgttttggtttacagtcaagactgagatgaggtcagtgattaaatcacaaacccatacttgccataggaggagacacacacctgtattcttcactggtagttcagttgagttgctaatctctcgtgaccttgttgctataatcagtaaagagtctcaacatgtatattacctgacatttgaactggttttgatgtattgtgatgtcatagaggggaggttaatgacagagaccgctatgactattgatgctaggtatacagagcttctaggaagagtcagatacatgtggaaactgatagatggtttcttccctgcactcgggaatccaacttatcaaattgtagccatgctggagcctctttcacttgcttacctgcagctgagggatataacagtagaactcagaggtgctttccttaaccactgctttactgaaatacatgatgttcttgaccaaaacgggttttctgatgaaggtacttatcatgagttaattgaagctctagattacattttcataactgatgacatacatctgacaggggagattttctcatttttcagaagtttcggccaccccagacttgaagcagtaacggctgctgaaaatgttaggaaatacatgaatcagcctaaagtcattgtgtatgagactctgatgaaaggtcatgccatattttgtggaatcataatcaacggctatcgtgacaggcacggaggcagttggccaccgctgaccctccccctgcatgctgcagacacaatccggaatgctcaagcttcaggtgaagggttaacacatgagcagtgcgttgataactggaaatcttttgctggagtgaaatttggctgctttatgcctcttagcctggatagtgatctgacaatgtacctaaaggacaaggcacttgctgctctccaaagggaatgggattcagtttacccgaaagagttcctgcgttacgaccctcccaagggaaccgggtcacggaggcttgtagatgttttccttaatgattcgagctttgacccatatgatgtgataatgtatgttgtaagtggagcttacctccatgaccctgagttcaacctgtcttacagcctgaaagaaaaggagatcaaggaaacaggtagactttttgctaaaatgacttacaaaatgagggcatgccaagtgattgctgaaaatctaatctcaaacgggattggcaaatattttaaggacaatgggatggccaaggatgagcacgatttgactaaggcactccacactctagctgtctcaggagtccccaaagatctcaaagaaagtcacaggggggggccagtcttaaaaacctactcccgaagcccagtccacacaagtaccaggaacgtgagagcagcaaaagggtttatagggttccctcaagtaattcggcaggaccaagacactgatcatccggagaatatggaagcttacgagacagtcagtgcatttatcacgactgatctcaagaagtactgccttaattggagatatgagaccatcagcttgtttgcacagaggctaaatgagatttacggattgccctcatttttccagtggctgcataagaggcttgagacctctgtcctgtatgtaagtgaccctcattgcccccccgaccttgacgcccatatcccgttatataaagtccccaatgatcaaatcttcattaagtaccctatgggaggtatagaagggtattgtcagaagctgtggaccatcagcaccattccctatctatacctggctgcttatgagagcggagtaaggattgcttcgttagtgcaaggggacaatcagaccatagccgtaacaaaaagggtacccagcacatggccctacaaccttaagaaacgggaagctgctagagtaactagagattactttgtaattcttaggcaaaggctacatgatattggccatcacctcaaggcaaatgagacaattgtttcatcacatttttttgtctattcaaaaggaatatattatgatgggctacttgtgtcccaatcactcaagagcatcgcaagatgtgtattctggtcagagactatagttgatgaaacaagggcagcatgcagtaatattgctacaacaatggctaaaagcatcgagagaggttatgaccgttaccttgcatattccctgaacgtcctaaaagtgatacagcaaattctgatctctcttggcttcacaatcaattcaaccatgacccgggatgtagtcatacccctcctcacaaacaacgacctcttaataaggatggcactgttgcccgctcctattggggggatgaattatctgaatatgagcaggctgtttgtcagaaacatcggtgatccagtaacatcatcaattgctgatctcaagagaatgattctcgcctcactaatgcctgaagagaccctccatcaagtaatgacacaacaaccgggggactcttcattcctagactgggctagcgacccttactcagcaaatcttgtatgtgtccagagcatcactagactcctcaagaacataactgcaaggtttgtcctgatccatagtccaaacccaatgttaaaaggattattccatgatgacagtaaagaagaggacgagggactggcggcattcctcatggacaggcatattatagtacctagggcagctcatgaaatcctggatcatagtgtcacaggggcaagagagtctattgcaggcatgctggataccacaaaaggcttgattcgagccagcatgaggaagggggggttaacctctcgagtgataaccagattgtccaattatgactatgaacaattcagagcagggatggtgctattgacaggaagaaagcgaaatgtcctcattgacaaagagtcatgttcagtgcagctggcgagagctctaagaagccatatgtgggcgaggctagctcgaggacggcctatttacggccttgaggtccctgatgtactagaatctatgcgaggccaccttattcggcgtcatgagacatgtgtcatctgcgagtgtggatcagtcaactacggatggttttttgtcccctcgggttgccaactggatgatattgacaaggaaacatcatccttgagagtcccatatattggttctaccactgatgagagaacagacatgaagcttgccttcgtaagagccccaagtcgatccttgcgatctgctgttagaatagcaacagtgtactcatgggcttacggtgatgatgatagctcttggaacgaagcctggttgttggctaggcaaagggccaatgtgagcctggaggagctaagggtgatcactcccatctcaacttcgactaatttagcgcataggttgagggatcgtagcactcaagtgaaatactcaggtacatcccttgtccgagtggcgaggtataccacaatctccaacgacaatctctcatttgtcatatcagataagaaggttgatactaactttatataccaacaaggaatgcttctagggttgggtgttttagaaacattgtttcgactcgagaaagataccggatcatctaacacggtattacatcttcacgtcgaaacagattgttgcgtgatcccgatgatagatcatcccaggatacccagctcccgcaagctagagctgagggcagagctatgtaccaacccattgatatatgataatgcacctttaattgacagagatgcaacaaggctatacacccagagccataggaggcaccttgtggaatttgttacatggtccacaccccaactatatcacattttagctaagtccacagcactatctatgattgacctggtaacaaaatttgagaaggaccatatgaatgaaatttcagctctcataggggatgacgatatcaatagtttcataactgagtttctgctcatagagccaagattattcactatctacttgggccagtgtgcggccatcaattgggcatttgatgtacattatcatagaccatcagggaaatatcagatgggtgagctgttgtcatcgttcctttctagaatgagcaaaggagtgtttaaggtgcttgtcaatgctctaagccacccaaagatctacaagaaattctggcattgtggtattatagagcctatccatggtccttcacttgatgctcaaaacttgcacacaactgtgtgcaacatggtttacacatgctatatgacctacctcgacctgttgttgaatgaagagttagaagagttcacatttctcttgtgtgaaagcgacgaggatgtagtaccggacagattcgacaacatccaggcaaaacacttatgtgttctggcagatttgtactgtcaaccagggacctgcccaccaattcgaggtctaagaccggtagagaaatgtgcagttctaaccgaccatatcaaggcagaggctatgttatctccagcaggatcttcgtggaacataaatccaattattgtagaccattactcatgctctctgacttatctccggcgaggatcgatcaaacagataagattgagagttgatccaggattcattttcgacgccctcgctgaggtaaatgtcagtcagccaaagatcggcagcaacaacatctcaaatatgagcatcaaggctttcagacccccacacgatgatgttgcaaaattgctcaaagatatcaacacaagcaagcacaatcttcccatttcagggggcaatctcgccaattatgaaatccatgctttccgcagaatcgggttgaactcatctgcttgctacaaagctgttgagatatcaacattaattaggagatgccttgagccaggggaggacggcttgttcttgggtgagggatcgggttctatgttgatcacttataaggagatacttaaactaaacaagtgcttctataatagtggggtttccgccaattctagatctggtcaaagggaattagcaccctatccctccgaagttggccttgtcgaacacagaatgggagtaggtaatattgtcaaagtgctctttaacgggaggcccgaagtcacgtgggtaggcagtgtagattgcttcaatttcatagttagtaatatccctacctctagtgtggggtttatccattcagatatagagaccttgcctgacaaagatactatagagaagctagaggaattggcagccatcttatcgatggctctgctcctgggcaaaataggatcaatactggtgattaagcttatgcctttcagcggggattttgttcagggatttataagttatgtagggtctcattatagagaagtgaaccttgtataccctagatacagcaacttcatctctactgaatcttatttggttatgacagatctcaaggctaaccggctaatgaatcctgaaaagattaagcagcagataattgaatcatctgtgaggacttcacctggacttataggtcacatcctatccattaagcaactaagctgcatacaagcaattgtgggagacgcagttagtagaggtgatatcaatcctactctgaaaaaacttacacctatagagcaggtgctgatcaattgcgggttggcaattaacggacctaagctgtgcaaagaattgatccaccatgatgttgcctcagggcaagatggattgcttaattctatactcatcctctacagggagttggcaagattcaaagacaaccaaagaagtcaacaagggatgttccacgcttaccccgtattggtaagtagcaggcaacgagaacttatatctaggatcacccgcaaattctgggggcacattcttctttactccgggaacagaaagttgataaataagtttatccagaatctcaagtccggctatctgatactagacttacaccagaatatcttcgttaagaatctatccaagtcagagaaacagattattatgacggggggtttgaaacgtgagtgggtttttaaggtaacagtcaaggagaccaaagaatggtataagttagtcggatacagtgccctgattaaggactaattggttgaactccggaaccctaatcctgccctaggtggttaggcattatttgcaatatattaaagaaaactttgaaaatacgaagtttctattcccagctttgtctggtggccggcatggtcccagcctcctcgctggcgccggctgggcaacattccgaggggaccgtcccctcggtaatggcgaatgggacgcggccggtcgatcgacgatccggctgctaacaaagcccgaaaggaagctgagttggctgctgccaccgctgagcaataactagcataaccccttggggcctctaaacgggtcttgaggggttttttgctgaaaggaggaactatatccggatcgagatcaattctgtgagcgtatggcaaacgaaggaaaaatagttatagtagccgcactcgatgggacatttcaacgtaaaccgtttaataatattttgaatcttattccattatctgaaatggtggtaaaactaactgctgtgtgtatgaaatgctttaaggaggcttccttttctaaacgattgggtgaggaaaccgagatagaaataataggaggtaatgatatgtatcaatcggtgtgtagaaagtgttacatcgactcataatattatattttttatctaaaaaactaaaaataaacattgattaaattttaatataatacttaaaaatggatgttgtgtcgttagataaaccgtttatgtattttgaggaaattgataatgagttagattacgaaccagaaagtgcaaatgaggtcgcaaaaaaactgccgtatcaaggacagttaaaactattactaggagaattattttttcttagtaagttacagcgacacggtatattagatggtgccaccgtagtgtatataggatctgctcccggtacacatatacgttatttgagagatcatttctataatttaggagtgatcccgaaaggaagctgagttggctgctgccaccgctgagcaataactagcataaccccttggggcctctaaacgggtcttgaggggttttttgctgaaaggaggaacgcgcctgatgcggtattttctccttacgcatctgtgcggtatttcacaccgcatatatggtgcactctcagtacaatctgctctgatgccgcatagttaagccagccccgacacccgccaacacccgctgacgcgccctgacgggcttgtctgctcccggcatccgcttacagacaagctgtgaccgtctccgggagctgcatgtgtcagaggttttcaccgtcatcaccgaaacgcgcgagacgaaagggcctcgtgatacgcctatttttataggttaatgtcatgataataatggtttcttagacgtcaggtggcacttttcggggaaatgtgcgcggaacccctatttgtttatttttctaaatacattcaaatatgtatccgctcatgagacaataaccctgataaatgcttcaataatattgaaaaaggaagagtatgagtattcaacatttccgtgtcgcccttattcccttttttgcggcattttgccttcctgtttttgctcacccagaaacgctggtgaaagtaaaagatgctgaagatcagttgggtgcacgagtgggttacatcgaactggatctcaacagcggtaagatccttgagagttttcgccccgaagaacgttttccaatgatgagcacttttaaagttctgctatgtggcgcggtattatcccgtattgacgccgggcaagagcaactcggtcgccgcatacactattctcagaatgacttggttgagtactcaccagtcacagaaaagcatcttacggatggcatgacagtaagagaattatgcagtgctgccataaccatgagtgataacactgcggccaacttacttctgacaacgatcggaggaccgaaggagctaaccgcttttttgcacaacatgggggatcatgtaactcgccttgatcgttgggaaccggagctgaatgaagccataccaaacgacgagcgtgacaccacgatgcctgtagcaatggcaacaacgttgcgcaaactattaactggcgaactacttactctagcttcccggcaacaattaatagactggatggaggcggataaagttgcaggaccacttctgcgctcggcccttccggctggctggtttattgctgataaatctggagccggtgagcgtgggtctcgcggtatcattgcagcactggggccagatggtaagccctcccgtatcgtagttatctacacgacggggagtcaggcaactatggatgaacgaaatagacagatcgctgagataggtgcctcactgattaagcattggtaactgtcagaccaagtttactcatatatactttagattgatttaaaacttcatttttaatttaaaaggatctaggtgaagatcctttttgataatctcatgaccaaaatcccttaacgtgagttttcgttccactgagcgtcagaccccgtagaaaagatcaaaggatcttcttgagatcctttttttctgcgcgtaatctgctgcttgcaaacaaaaaaaccaccgctaccagcggtggtttgtttgccggatcaagagctaccaactctttttccgaaggtaactggcttcagcagagcgcagataccaaatactgtccttctagtgtagccgtagttaggccaccacttcaagaactctgtagcaccgcctacatacctcgctctgctaatcctgttaccagtggctgctgccagtggcgataagtcgtgtcttaccgggttggactcaagacgatagttaccggataaggcgcagcggtcgggctgaacggggggttcgtgcacacagcccagcttggagcgaacgacctacaccgaactgagatacctacagcgtgagcattgagaaagcgccacgcttcccgaagggagaaaggcggacaggtatccggtaagcggcagggtcggaacaggagagcgcacgagggagcttccagggggaaacgcctggtatctttatagtcctgtcgggtttcgccacctctgacttgagcgtcgatttttgtgatgctcgtcaggggggcggagcctatggaaaaacgccagcaacgcggcctttttacggttcctggccttttgctggccttttgctcacatgttctttcctgcgttatcccctgattctgtggataaccgtattaccgcctttgagtgagctgataccgctcgccgcagccgaacgaccgagcgcagcgagtcagtgagcgaggaagcggaagagcgcccaatacgcaaaccgcctctccccgcgcgttggccgattcattaatgcagctggcacgacaggtttcccgactggaaagcgggcagtgagcgcaacgcaattaatgtgagttagctcactcattaggcaccccaggctttacactttatgcttccggctcgtatgttgtgtggaattgtgagcggataacaatttcacacaggaaacagctatgaccatgattacgccaagcttacgcgtcctggcattatgcccagtacatgaccttatgggactttcctacttggcagtacatctacgtattagtcatcgctattaccatggtgatgcggttttggcagtacatcaatgggcgtggatagcggtttgactcacggggatttccaagtctccaccccattgacgtcaatgggagtttgttttggcaccaaaatcaacgggactttccaaaatgtcgtaacaactccgccccattgacgcaaatgggcggtaggcgtgtacggtgggaggtctatataagcagagctcgtttagtgaaccgtgg

SEQ ID NO: 32 - DNA, 20538 bp, Artificial Sequence
  Vector with soluble s4-1BBL ectodomain construct
accaaacaaagttgggtaaggatagttcaatcaatgatcatcttctagtgcacttaggattcaagatcctattatcagggacaagagcaggattagggatatctcgaggcgcgtgccaccatgcccatggggtctctgcaaccgctggccaccttgtacctgctggggatgctggtcgcttcctgcctcggatctggtgctggaggatcaggtggttctagtggaagtgatggtgctagcgggtctggcgttcgactttgggctacaagacaggcaatgctgggccaggtccatgaggttcctgaggggtggctcattttcgtggccgagcaggaggagctgtatgttcgcgtgcaaaacggctttaggaaggtccagctggaagcgcggacacctttgcccaggggaaccgataacgagggatccttggacctgcggcagggcatgtttgcgcagctggtggcccaaaatgttctgctgatcgatgggcccctgagctggtacagtgacccaggcctggcaggcgtgtccctgacggggggcctgagctacaaagaggacacgaaggagctggtggtggccaaggctggagtctactatgtcttctttcaactagagctgcggcgcgtggtggccggcgagggctcaggctccgtttcacttgcgctgcacctgcagccactgcgctctgctgctggggccgccgccctggctttgaccgtggacctgccacccgcctcctccgaggctcggaactcggccttcggtttccagggccgcttgctgcacctgagtgccggccagcgcctgggcgtccatcttcacactgaggccagggcacgccatgcctggcagcttacccagggcgccacagtcttgggactcttccgggtgacccccgaaatcccagccggactcccttcaccgaggtcggaataaacgcgccatccatcattgttataaaaaacttaggattcaagatcctattatcagggacaagagcaggattagggatatccgagatggccacacttttaaggagcttagcattgttcaaaagaaacaaggacaaaccacccattacatcaggatccggtggagccatcagaggaatcaaacacattattatagtaccaatccctggagattcctcaattaccactcgatccagacttctggaccggttggtcaggttaattggaaacccggatgtgagcgggcccaaactaacaggggcactaataggtatattatccttatttgtggagtctccaggtcaattgattcagaggatcaccgatgaccctgacgttagcataaggctgttagaggttgtccagagtgaccagtcacaatctggccttaccttcgcatcaagaggtaccaacatggaggatgaggcggaccaatacttttcacatgatgatccaattagtagtgatcaatccaggttcggatggttcgagaacaaggaaatctcagatattgaagtgcaagaccctgagggattcaacatgattctgggtaccatcctagcccaaatttgggtcttgctcgcaaaggcggttacggccccagacacggcagctgattcggagctaagaaggtggataaagtacacccaacaaagaagggtggttggtgaatttagattggagagaaaatggttggatgtggtgaggaacaggattgccgaggacctctccttacgccgattcatggtcgctctaatcctggatatcaagagaacacccggaaacaaacccaggattgctgaaatgatatgtgacattgatacatatatcgtagaggcaggattagccagttttatcctgactattaagtttgggatagaaactatgtatcctgctcttggactgcatgaatttgctggtgagttatccacacttgagtccttgatgaacctttaccagcaaatgggggaaactgcaccctacatggtaatcctggagaactcaattcagaacaagttcagtgcaggatcataccctctgctctggagctatgccatgggagtaggagtggaacttgaaaactccatgggaggtttgaactttggccgatcttactttgatccagcatattttagattagggcaagagatggtaaggaggtcagctggaaaggtcagttccacattggcatctgaactcggtatcactgccgaggatgcaaggcttgtttcagagattgcaatgcatactactgaggacaagatcagtagagcggttggacccagacaagcccaagtatcatttctacacggtgatcaaagtgagaatgagctaccgagattggggggcaaggaagataggagggtcaaacagagtcgaggagaagccagggagagctacagagaaaccgggcccagcagagcaagtgatgcgagagctgcccatcttccaaccggcacacccctagacattgacactgcaacggagtccagccaagatccgcaggacagtcgaaggtcagctgacgccctgcttaggctgcaagccatggcaggaatctcggaagaacaaggctcagacacggacacccctatagtgtacaatgacagaaatcttctagactaggtgcgagaggccgagggccagaacaacatccgcctaccctccatcattgttataaaaaacttaggaaccaggtccacacagccgccagcccatcaaccatccactcccacgattggagccaatggcagaagagcaggcacgccatgtcaaaaacggactggaatgcatccgggctctcaaggccgagcccatcggctcactggccatcgaggaagctatggcagcatggtcagaaatatcagacaacccaggacaggagcgagccacctgcagggaagagaaggcaggcagttcgggtctcagcaaaccatgcctctcagcaattggatcaactgaaggcggtgcacctcgcatccgcggtcagggacctggagagagcgatgacgacgctgaaactttgggaatccccccaagaaatctccaggcatcaagcactgggttacagtgttattacgtttatgatcacagcggtgaagcggttaagggaatccaagatgctgactctatcatggttcaatcaggccttgatggtgatagcaccctctcaggaggagacaatgaatctgaaaacagcgatgtggatattggcgaacctgataccgagggatatgctatcactgaccggggatctgctcccatctctatggggttcagggcttctgatgttgaaactgcagaaggaggggagatccacgagctcctgagactccaatccagaggcaacaactttccgaagcttgggaaaactctcaatgttcctccgcccccggaccccggtagggccagcacttccgggacacccattaaaaagggcacagacgcgagattagcctcatttggaacggagatcgcgtctttattgacaggtggtgcaacccaatgtgctcgaaagtcaccctcggaaccatcagggccaggtgcacctgcggggaatgtccccgagtgtgtgagcaatgccgcactgatacaggagtggacacccgaatctggtaccacaatctccccgagatcccagaataatgaagaagggggagactattatgatgatgagctgttctctgatgtccaagatattaaaacagccttggccaaaatacacgaggataatcagaagataatctccaagctagaatcactgctgttattgaagggagaagttgagtcaattaagaagcagatcaacaggcaaaatatcagcatatccaccctggaaggacacctctcaagcatcatgatcgccattcctggacttgggaaggatcccaacgaccccactgcagatgtcgaaatcaatcccgacttgaaacccatcataggcagagattcaggccgagcactggccgaagttctcaagaaacccgttgccagccgacaactccaaggaatgacaaatggacggaccagttccagaggacagctgctgaaggaatttcagctaaagccgatcgggaaaaagatgagctcagccgtcgggtttgttcctgacaccggccctgcatcacgcagtgtaatccgctccattataaaatccagccggctagaggaggatcggaagcgttacctgatgactctccttgatgatatcaaaggagccaatgatcttgccaagttccaccagatgctgatgaagataataatgaagtagctacagctcaacttacctgccaaccccatgccagtcgacccaactagtacaacctaaatccattataaaaaacttaggagcaaagtgattgcctcccaagttccacaatgacagagacctacgacttcgacaagtcggcatgggacatcaaagggtcgatcgctccgatacaacccaccacctacagtgatggcaggctggtgccccaggtcagagtcatagatcctggtctaggcgacaggaaggatgaatgctttatgtacatgtttctgctgggggttgttgaggacagcgattccctagggcctccaatcgggcgagcatttgggtccctgcccttaggtgttggcagatccacagcaaagcccgaaaaactcctcaaagaggccactgagcttgacatagttgttagacgtacagcagggctcaatgaaaaactggtgttctacaacaacaccccactaactctcctcacaccttggagaaaggtcctaacaacagggagtgtcttcaacgcaaaccaagtgtgcaatgcggttaatctgataccgctcgataccccgcagaggttccgtgttgtttatatgagcatcacccgtctttcggataacgggtattacaccgttcctagaagaatgctggaattcagatcggtcaatgcagtggccttcaacctgctggtgacccttaggattgacaaggcgataggccctgggaagatcatcgacaatacagagcaacttcctgaggcaacatttatggtccacatcgggaacttcaggagaaagaagagtgaagtctactctgccgattattgcaaaatgaaaatcgaaaagatgggcctggtttttgcacttggtgggatagggggcaccagtcttcacattagaagcacaggcaaaatgagcaagactctccatgcacaactcgggttcaagaagaccttatgttacccgctgatggatatcaatgaagaccttaatcgattactctggaggagcagatgcaagatagtaagaatccaggcagttttgcagccatcagttcctcaagaattccgcatttacgacgacgtgatcataaatgatgaccaaggactattcaaagttctgtagaccgtagtgcccagcaatgcccgaaaacgacccccctcacaatgacagccagaaggcccggacaaaaaagccccctccgaaagactccacggaccaagcgagaggccagccagcagccgacggcaagcgcgaacaccaggcggccccagcacagaacagccccgacacaaggccaccaccagccaccccaatctgcatcctcctcgtgggacccccgaggaccaacccccaaggctgcccccgatccaaaccaccaaccgcatccccaccacccccgggaaagaaacccccagcaattggaaggcccctccccctcttcctcaacacaagaactccacaaccgaaccgcacaagcgaccgaggtgacccaaccgcaggcatccgactccctagacagatcctctctccccggcaaactaaacaaaacttagggccaaggaacatacacacccaacagaacccagaccccggcccacggcgccgcgcccccaacccccgacaaccagagggagcccccaaccaatcccgccggctcccccggtgcccacaggcagggacaccaacccccgaacagacccagcacccaaccatcgacaatccaagacgggggggcccccccaaaaaaaggcccccaggggccgacagccagcaccgcgaggaagcccacccaccccacacacgaccacggcaaccaaaccagaacccagaccaccctgggccaccagctcccagactcggccatcaccccgcagaaaggaaaggccacaacccgcgcaccccagccccgatccggcggggagccacccaacccgaaccagcacccaagagcgatccccgaaggacccccgaaccgcaaaggacaccagtatcccacagcctctccaagtcccccggtctcctcctcttctcgaagggaccaaaagatcaatccaccacacccgacgacactcaactccccacccctaaaggagacaccgggaatcccagaatcaagactcatccaatgtccatcatgggtctcaaggtgaacgtctctgccatattcatggcagtactgttaactctccaaacacccaccggtcaaatccattggggcaatctctctaagataggggtggtaggaataggaagtgcaagctacaaagttatgactcgttccagccatcaatcattagtcataaaattaatgcccaatataactctcctcaataactgcacgagggtagagattgcagaatacaggagactactgagaacagttttggaaccaattagagatgcacttaatgcaatgacccagaatataagaccggttcagagtgtagcttcaagtaggagacacaagagatttgcgggagtagtcctggcaggtgcggccctaggcgttgccacagctgctcagataacagccggcattgcacttcaccagtccatgctgaactctcaagccatcgacaatctgagagcgagcctggaaactactaatcaggcaattgaggcaatcagacaagcagggcaggagatgatattggctgttcagggtgtccaagactacatcaataatgagctgataccgtctatgaaccaactatcttgtgatttaatcggccagaagctcgggctcaaattgctcagatactatacagaaatcctgtcattatttggccccagtttacgggaccccatatctgcggagatatctatccaggctttgagctatgcgcttggaggagacatcaataaggtgttagaaaagctcggatacagtggaggtgatttactgggcatcttagagagcggaggcatcaaggcccggataactcacgtcgacacagagtcctacttcattgtcctcagtatagcctatccgacgctgtccgagattaagggggtgattgtccaccggctagagggggtctcgtacaacataggctctcaagagtggtataccactgtgcccaagtatgttgcaacccaagggtaccttatctcgaattttgatgagtcatcgtgtactttcatgccagaggggactgtgtgcagccaaaatgccttgtacccgatgagtcctctgctccaagaatgcctccgggggtacaccaagtcctgtgctcgtacactcgtatccgggtcttttgggaaccggttcattttatcacaagggaacctaatagccaattgtgcatcaatcctttgcaagtgttacacaacaggaacgatcattaatcaagaccctgacaagatcctaacatacattgctgccgatcactgcccggtagtcgaggtgaacggcgtgatcatccaagtcgggagcaggaggtatccagacgctgtgtacttgcacagaattgacctcggtcctcccatatcattggagaggttggacgtagggacaaatctggggaatgcaattgctaagttggaggatgccaaggaattgttggagtcatcggaccagatattgaggagtatgaaaggtttatcgagcactagcatagtctacatcctgattgcagtgtgtcttggagggttgatagggatccccgctttaatatgttgctgcagggggcgttgtaacaaaaagggagaacaagttggtatgtcaagaccaggcctaaagcctgatcttacgggaacatcaaaatcctatgtaaggtcgctctgatcctctacaactcttgaaacacaaatgtcccacaagtctcctcttcgtcatcaagcaaccaccgcacccagcatcaagcccacctgaaattatctccggcttccctctggccgaacaatatcggtagttaattaaaacttagggtgcaagatcatccacaatgtcaccacaacgagaccggataaatgccttctacaaagataacccccatcccaagggaagtaggatagtcattaacagagaacatcttatgattgatagaccttatgttttgctggctgttctgtttgtcatgtttctgagcttgatcgggttgctagccattgcaggcattagacttcatcgggcagccatctacaccgcagagatccataaaagcctcagcaccaatctagatgtaactaactcaatcgagcatcaggtcaaggacgtgctgacaccactcttcaaaatcatcggtgatgaagtgggcctgaggacacctcagagattcactgacctagtgaaattcatctctgacaagatcaagttccttaatccggatagggagtacgacttcagagatctcacttggtgtatcaacccgccagagagaatcaaattggattatgatcaatactgtgcagatgtggctgctgaagagctcatgaatgcattggtgaactcaactctactggagaccagaacaaccaatcagttcctagctgtctcaaagggaaactgctcagggcccactacaatcagaggtcaattctcaaacatgtcgctgtccctgttagacttgtatttaggtcgaggttacaatgtgtcatctatagtcactatgacatcccagggaatgtatgggggaacttacctagtggaaaagcctaatctgagcagcaaaaggtcagagttgtcacaactgagcatgtaccgagtgtttgaagtaggtgttatcagaaatccgggtttgggggctccggtgttccatatgacaaactatcttgagcaaccagtcagtaatgatctcagcaactgtatggtggctttgggggagctcaaactcgcagccctttgtcacggggaagattctatcacaattccctatcagggatcagggaaaggtgtcagcttccagctcgtcaagctaggtgtctggaaatccccaaccgacatgcaatcctgggtccccttatcaacggatgatccagtgatagacaggctttacctctcatctcacagaggtgttatcgctgacaatcaagcaaaatgggctgtcccgacaacacgaacagatgacaagttgcgaatggagacatgcttccaacaggcgtgtaagggtaaaatccaagcactctgcgagaatcccgagtgggcaccattgaaggataacaggattccttcatacggggtcttgtctgttgatctgagtctgacagttgagcttaaaatcaaaattgcttcgggattcgggccattgatcacacacggttcagggatggacctatacaaatccaaccacaacaatgtgtattggctgactatcccgccaatgaagaacctagccttaggtgtaatcaacacattggagtggataccgagattcaaggttagtccctacctcttcactgtcccaattaaggaagcaggcgaagactgccatgccccaacatacctacctgcggaggtggatggtgatgtcaaactcagttccaatctggtgattctacctggtcaagatctccaatatgttttggcaacctacgatacttccagggttgaacatgctgtggtttattacgtttacagcccaagccgctcattttcttacttttatccttttaggttgcctataaagggggtccccatcgaattacaagtggaatgcttcacatgggaccaaaaactctggtgccgtcacttctgtgtgcttgcggactcagaatctggtggacatatcactcactctgggatggtgggcatgggagtcagctgcacagtcacccgggaagatggaaccaatcgcagatagggctgctagtgaaccaatcacatgatgtcacccagacatcaggcatacccactagtgtgaaatagacatcagaattaagaaaaacgtagggtccaagtggttccccgttatggactcgctatctgtcaaccagatcttataccctgaagttcacctagatagcccgatagttaccaataagatagtagccatcctggagtatgctcgagtccctcacgcttacagcctggaggaccctacactgtgtcagaacatcaagcaccgcctaaaaaacggattttccaaccaaatgattataaacaatgtggaagttgggaatgtcatcaagtccaagcttaggagttatccggcccactctcatattccatatccaaattgtaatcaggatttatttaacatagaagacaaagagtcaacgaggaagatccgtgaactcctcaaaaaggggaattcgctgtactccaaagtcagtgataaggttttccaatgcttaagggacactaactcacggcttggcctaggctccgaattgagggaggacatcaaggagaaagttattaacttgggagtttacatgcacagctcccagtggtttgagccctttctgttttggtttacagtcaagactgagatgaggtcagtgattaaatcacaaacccatacttgccataggaggagacacacacctgtattcttcactggtagttcagttgagttgctaatctctcgtgaccttgttgctataatcagtaaagagtctcaacatgtatattacctgacatttgaactggttttgatgtattgtgatgtcatagaggggaggttaatgacagagaccgctatgactattgatgctaggtatacagagcttctaggaagagtcagatacatgtggaaactgatagatggtttcttccctgcactcgggaatccaacttatcaaattgtagccatgctggagcctctttcacttgcttacctgcagctgagggatataacagtagaactcagaggtgctttccttaaccactgctttactgaaatacatgatgttcttgaccaaaacgggttttctgatgaaggtacttatcatgagttaattgaagctctagattacattttcataactgatgacatacatctgacaggggagattttctcatttttcagaagtttcggccaccccagacttgaagcagtaacggctgctgaaaatgttaggaaatacatgaatcagcctaaagtcattgtgtatgagactctgatgaaaggtcatgccatattttgtggaatcataatcaacggctatcgtgacaggcacggaggcagttggccaccgctgaccctccccctgcatgctgcagacacaatccggaatgctcaagcttcaggtgaagggttaacacatgagcagtgcgttgataactggaaatcttttgctggagtgaaatttggctgctttatgcctcttagcctggatagtgatctgacaatgtacctaaaggacaaggcacttgctgctctccaaagggaatgggattcagtttacccgaaagagttcctgcgttacgaccctcccaagggaaccgggtcacggaggcttgtagatgttttccttaatgattcgagctttgacccatatgatgtgataatgtatgttgtaagtggagcttacctccatgaccctgagttcaacctgtcttacagcctgaaagaaaaggagatcaaggaaacaggtagactttttgctaaaatgacttacaaaatgagggcatgccaagtgattgctgaaaatctaatctcaaacgggattggcaaatattttaaggacaatgggatggccaaggatgagcacgatttgactaaggcactccacactctagctgtctcaggagtccccaaagatctcaaagaaagtcacaggggggggccagtcttaaaaacctactcccgaagcccagtccacacaagtaccaggaacgtgagagcagcaaaagggtttatagggttccctcaagtaattcggcaggaccaagacactgatcatccggagaatatggaagcttacgagacagtcagtgcatttatcacgactgatctcaagaagtactgccttaattggagatatgagaccatcagcttgtttgcacagaggctaaatgagatttacggattgccctcatttttccagtggctgcataagaggcttgagacctctgtcctgtatgtaagtgaccctcattgcccccccgaccttgacgcccatatcccgttatataaagtccccaatgatcaaatcttcattaagtaccctatgggaggtatagaagggtattgtcagaagctgtggaccatcagcaccattccctatctatacctggctgcttatgagagcggagtaaggattgcttcgttagtgcaaggggacaatcagaccatagccgtaacaaaaagggtacccagcacatggccctacaaccttaagaaacgggaagctgctagagtaactagagattactttgtaattcttaggcaaaggctacatgatattggccatcacctcaaggcaaatgagacaattgtttcatcacatttttttgtctattcaaaaggaatatattatgatgggctacttgtgtcccaatcactcaagagcatcgcaagatgtgtattctggtcagagactatagttgatgaaacaagggcagcatgcagtaatattgctacaacaatggctaaaagcatcgagagaggttatgaccgttaccttgcatattccctgaacgtcctaaaagtgatacagcaaattctgatctctcttggcttcacaatcaattcaaccatgacccgggatgtagtcatacccctcctcacaaacaacgacctcttaataaggatggcactgttgcccgctcctattggggggatgaattatctgaatatgagcaggctgtttgtcagaaacatcggtgatccagtaacatcatcaattgctgatctcaagagaatgattctcgcctcactaatgcctgaagagaccctccatcaagtaatgacacaacaaccgggggactcttcattcctagactgggctagcgacccttactcagcaaatcttgtatgtgtccagagcatcactagactcctcaagaacataactgcaaggtttgtcctgatccatagtccaaacccaatgttaaaaggattattccatgatgacagtaaagaagaggacgagggactggcggcattcctcatggacaggcatattatagtacctagggcagctcatgaaatcctggatcatagtgtcacaggggcaagagagtctattgcaggcatgctggataccacaaaaggcttgattcgagccagcatgaggaagggggggttaacctctcgagtgataaccagattgtccaattatgactatgaacaattcagagcagggatggtgctattgacaggaagaaagcgaaatgtcctcattgacaaagagtcatgttcagtgcagctggcgagagctctaagaagccatatgtgggcgaggctagctcgaggacggcctatttacggccttgaggtccctgatgtactagaatctatgcgaggccaccttattcggcgtcatgagacatgtgtcatctgcgagtgtggatcagtcaactacggatggttttttgtcccctcgggttgccaactggatgatattgacaaggaaacatcatccttgagagtcccatatattggttctaccactgatgagagaacagacatgaagcttgccttcgtaagagccccaagtcgatccttgcgatctgctgttagaatagcaacagtgtactcatgggcttacggtgatgatgatagctcttggaacgaagcctggttgttggctaggcaaagggccaatgtgagcctggaggagctaagggtgatcactcccatctcaacttcgactaatttagcgcataggttgagggatcgtagcactcaagtgaaatactcaggtacatcccttgtccgagtggcgaggtataccacaatctccaacgacaatctctcatttgtcatatcagataagaaggttgatactaactttatataccaacaaggaatgcttctagggttgggtgttttagaaacattgtttcgactcgagaaagataccggatcatctaacacggtattacatcttcacgtcgaaacagattgttgcgtgatcccgatgatagatcatcccaggatacccagctcccgcaagctagagctgagggcagagctatgtaccaacccattgatatatgataatgcacctttaattgacagagatgcaacaaggctatacacccagagccataggaggcaccttgtggaatttgttacatggtccacaccccaactatatcacattttagctaagtccacagcactatctatgattgacctggtaacaaaatttgagaaggaccatatgaatgaaatttcagctctcataggggatgacgatatcaatagtttcataactgagtttctgctcatagagccaagattattcactatctacttgggccagtgtgcggccatcaattgggcatttgatgtacattatcatagaccatcagggaaatatcagatgggtgagctgttgtcatcgttcctttctagaatgagcaaaggagtgtttaaggtgcttgtcaatgctctaagccacccaaagatctacaagaaattctggcattgtggtattatagagcctatccatggtccttcacttgatgctcaaaacttgcacacaactgtgtgcaacatggtttacacatgctatatgacctacctcgacctgttgttgaatgaagagttagaagagttcacatttctcttgtgtgaaagcgacgaggatgtagtaccggacagattcgacaacatccaggcaaaacacttatgtgttctggcagatttgtactgtcaaccagggacctgcccaccaattcgaggtctaagaccggtagagaaatgtgcagttctaaccgaccatatcaaggcagaggctatgttatctccagcaggatcttcgtggaacataaatccaattattgtagaccattactcatgctctctgacttatctccggcgaggatcgatcaaacagataagattgagagttgatccaggattcattttcgacgccctcgctgaggtaaatgtcagtcagccaaagatcggcagcaacaacatctcaaatatgagcatcaaggctttcagacccccacacgatgatgttgcaaaattgctcaaagatatcaacacaagcaagcacaatcttcccatttcagggggcaatctcgccaattatgaaatccatgctttccgcagaatcgggttgaactcatctgcttgctacaaagctgttgagatatcaacattaattaggagatgccttgagccaggggaggacggcttgttcttgggtgagggatcgggttctatgttgatcacttataaggagatacttaaactaaacaagtgcttctataatagtggggtttccgccaattctagatctggtcaaagggaattagcaccctatccctccgaagttggccttgtcgaacacagaatgggagtaggtaatattgtcaaagtgctctttaacgggaggcccgaagtcacgtgggtaggcagtgtagattgcttcaatttcatagttagtaatatccctacctctagtgtggggtttatccattcagatatagagaccttgcctgacaaagatactatagagaagctagaggaattggcagccatcttatcgatggctctgctcctgggcaaaataggatcaatactggtgattaagcttatgcctttcagcggggattttgttcagggatttataagttatgtagggtctcattatagagaagtgaaccttgtataccctagatacagcaacttcatctctactgaatcttatttggttatgacagatctcaaggctaaccggctaatgaatcctgaaaagattaagcagcagataattgaatcatctgtgaggacttcacctggacttataggtcacatcctatccattaagcaactaagctgcatacaagcaattgtgggagacgcagttagtagaggtgatatcaatcctactctgaaaaaacttacacctatagagcaggtgctgatcaattgcgggttggcaattaacggacctaagctgtgcaaagaattgatccaccatgatgttgcctcagggcaagatggattgcttaattctatactcatcctctacagggagttggcaagattcaaagacaaccaaagaagtcaacaagggatgttccacgcttaccccgtattggtaagtagcaggcaacgagaacttatatctaggatcacccgcaaattctgggggcacattcttctttactccgggaacagaaagttgataaataagtttatccagaatctcaagtccggctatctgatactagacttacaccagaatatcttcgttaagaatctatccaagtcagagaaacagattattatgacggggggtttgaaacgtgagtgggtttttaaggtaacagtcaaggagaccaaagaatggtataagttagtcggatacagtgccctgattaaggactaattggttgaactccggaaccctaatcctgccctaggtggttaggcattatttgcaatatattaaagaaaactttgaaaatacgaagtttctattcccagctttgtctggtggccggcatggtcccagcctcctcgctggcgccggctgggcaacattccgaggggaccgtcccctcggtaatggcgaatgggacgcggccggtcgatcgacgatccggctgctaacaaagcccgaaaggaagctgagttggctgctgccaccgctgagcaataactagcataaccccttggggcctctaaacgggtcttgaggggttttttgctgaaaggaggaactatatccggatcgagatcaattctgtgagcgtatggcaaacgaaggaaaaatagttatagtagccgcactcgatgggacatttcaacgtaaaccgtttaataatattttgaatcttattccattatctgaaatggtggtaaaactaactgctgtgtgtatgaaatgctttaaggaggcttccttttctaaacgattgggtgaggaaaccgagatagaaataataggaggtaatgatatgtatcaatcggtgtgtagaaagtgttacatcgactcataatattatattttttatctaaaaaactaaaaataaacattgattaaattttaatataatacttaaaaatggatgttgtgtcgttagataaaccgtttatgtattttgaggaaattgataatgagttagattacgaaccagaaagtgcaaatgaggtcgcaaaaaaactgccgtatcaaggacagttaaaactattactaggagaattattttttcttagtaagttacagcgacacggtatattagatggtgccaccgtagtgtatataggatctgctcccggtacacatatacgttatttgagagatcatttctataatttaggagtgatcccgaaaggaagctgagttggctgctgccaccgctgagcaataactagcataaccccttggggcctctaaacgggtcttgaggggttttttgctgaaaggaggaacgcgcctgatgcggtattttctccttacgcatctgtgcggtatttcacaccgcatatatggtgcactctcagtacaatctgctctgatgccgcatagttaagccagccccgacacccgccaacacccgctgacgcgccctgacgggcttgtctgctcccggcatccgcttacagacaagctgtgaccgtctccgggagctgcatgtgtcagaggttttcaccgtcatcaccgaaacgcgcgagacgaaagggcctcgtgatacgcctatttttataggttaatgtcatgataataatggtttcttagacgtcaggtggcacttttcggggaaatgtgcgcggaacccctatttgtttatttttctaaatacattcaaatatgtatccgctcatgagacaataaccctgataaatgcttcaataatattgaaaaaggaagagtatgagtattcaacatttccgtgtcgcccttattcccttttttgcggcattttgccttcctgtttttgctcacccagaaacgctggtgaaagtaaaagatgctgaagatcagttgggtgcacgagtgggttacatcgaactggatctcaacagcggtaagatccttgagagttttcgccccgaagaacgttttccaatgatgagcacttttaaagttctgctatgtggcgcggtattatcccgtattgacgccgggcaagagcaactcggtcgccgcatacactattctcagaatgacttggttgagtactcaccagtcacagaaaagcatcttacggatggcatgacagtaagagaattatgcagtgctgccataaccatgagtgataacactgcggccaacttacttctgacaacgatcggaggaccgaaggagctaaccgcttttttgcacaacatgggggatcatgtaactcgccttgatcgttgggaaccggagctgaatgaagccataccaaacgacgagcgtgacaccacgatgcctgtagcaatggcaacaacgttgcgcaaactattaactggcgaactacttactctagcttcccggcaacaattaatagactggatggaggcggataaagttgcaggaccacttctgcgctcggcccttccggctggctggtttattgctgataaatctggagccggtgagcgtgggtctcgcggtatcattgcagcactggggccagatggtaagccctcccgtatcgtagttatctacacgacggggagtcaggcaactatggatgaacgaaatagacagatcgctgagataggtgcctcactgattaagcattggtaactgtcagaccaagtttactcatatatactttagattgatttaaaacttcatttttaatttaaaaggatctaggtgaagatcctttttgataatctcatgaccaaaatcccttaacgtgagttttcgttccactgagcgtcagaccccgtagaaaagatcaaaggatcttcttgagatcctttttttctgcgcgtaatctgctgcttgcaaacaaaaaaaccaccgctaccagcggtggtttgtttgccggatcaagagctaccaactctttttccgaaggtaactggcttcagcagagcgcagataccaaatactgtccttctagtgtagccgtagttaggccaccacttcaagaactctgtagcaccgcctacatacctcgctctgctaatcctgttaccagtggctgctgccagtggcgataagtcgtgtcttaccgggttggactcaagacgatagttaccggataaggcgcagcggtcgggctgaacggggggttcgtgcacacagcccagcttggagcgaacgacctacaccgaactgagatacctacagcgtgagcattgagaaagcgccacgcttcccgaagggagaaaggcggacaggtatccggtaagcggcagggtcggaacaggagagcgcacgagggagcttccagggggaaacgcctggtatctttatagtcctgtcgggtttcgccacctctgacttgagcgtcgatttttgtgatgctcgtcaggggggcggagcctatggaaaaacgccagcaacgcggcctttttacggttcctggccttttgctggccttttgctcacatgttctttcctgcgttatcccctgattctgtggataaccgtattaccgcctttgagtgagctgataccgctcgccgcagccgaacgaccgagcgcagcgagtcagtgagcgaggaagcggaagagcgcccaatacgcaaaccgcctctccccgcgcgttggccgattcattaatgcagctggcacgacaggtttcccgactggaaagcgggcagtgagcgcaacgcaattaatgtgagttagctcactcattaggcaccccaggctttacactttatgcttccggctcgtatgttgtgtggaattgtgagcggataacaatttcacacaggaaacagctatgaccatgattacgccaagcttacgcgtcctggcattatgcccagtacatgaccttatgggactttcctacttggcagtacatctacgtattagtcatcgctattaccatggtgatgcggttttggcagtacatcaatgggcgtggatagcggtttgactcacggggatttccaagtctccaccccattgacgtcaatgggagtttgttttggcaccaaaatcaacgggactttccaaaatgtcgtaacaactccgccccattgacgcaaatgggcggtaggcgtgtacggtgggaggtctatataagcagagctcgtttagtgaaccgtgg

SEQ ID NO: 33 - DNA, 35242 bp, Artificial Sequence
  Vector with soluble s4-1BBL ectodomain construct
catcatcaataatataccttattttggattgaagccaatatgataatgagggggtggagtttgtgacgtggcgcggggcgtgggaacggggcgggtgacgtagtagtgtggcggaagtgtgatgttgcaagtgtggcggaacacatgtaagcgacggatgtggcaaaagtgacgtttttggtgtgcgccggtgtacacaggaagtgacaattttcgcgcggttttaggcggatgttgtagtaaatttgggcgtaaccgagtaagatttggccattttcgcgggaaaactgaataagaggaagtgaaatctgaataattttgtgttactcatagcgcgtaatatttgtctagggccgcggggactttgaccgtttacgtggagactcgcccaggtgtttttctcaggtgttttccgcgttccgggtcaaagttggcgttttattattatagtcagtcgaagcttggatccggtacctctagaattctcgagcggccgctagcgacatcggatctcccgatcccctatggtcgactctcagtacaatctgctctgatgccgcatagttaagccagtatctgctccctgcttgtgtgttggaggtcgctgagtagtgcgcgagcaaaatttaagctacaacaaggcaaggcttgaccgacaattgcatgaagaatctgcttagggttaggcgttttgcgctgcttcgcgatgtacgggccagatatacgcgttgacattgattattgactagttattaatagtaatcaattacggggtcattagttcatagcccatatatggagttccgcgttacataacttacggtaaatggcccgcctggctgaccgcccaacgacccccgcccattgacgtcaataatgacgtatgttcccatagtaacgccaatagggactttccattgacgtcaatgggtggactatttacggtaaactgcccacttggcagtacatcaagtgtatcatatgccaagtacgccccctattgacgtcaatgacggtaaatggcccgcctggcattatgcccagtacatgaccttatgggactttcctacttggcagtacatctacgtattagtcatcgctattaccatggtgatgcggttttggcagtacatcaatgggcgtggatagcggtttgactcacggggatttccaagtctccaccccattgacgtcaatgggagtttgttttggcaccaaaatcaacgggactttccaaaatgtcgtaacaactccgccccattgacgcaaatgggcggtaggcgtgtacggtgggaggtctatataagcagagctctctggctaactagagaacccactgcttactggcttatcgaaattaatacgactcactatagggagacccaagctggctagttaagctatcaacaagtttgtacaaaaaagcaggctgccaccatgcccatggggtctctgcaaccgctggccaccttgtacctgctggggatgctggtcgcttcctgcctcggaggcgttcgactttgggctacaagacaggcaatgctgggccaggtccatgaggttcctgaggggtggctcattttcgtggccgagcaggaggagctgtatgttcgcgtgcaaaacggctttaggaaggtccagctggaagcgcggacacctttgcccaggggaaccgataacgagggatccttggacctgcggcagggcatgtttgcgcagctggtggcccaaaatgttctgctgatcgatgggcccctgagctggtacagtgacccaggcctggcaggcgtgtccctgacggggggcctgagctacaaagaggacacgaaggagctggtggtggccaaggctggagtctactatgtcttctttcaactagagctgcggcgcgtggtggccggcgagggctcaggctccgtttcacttgcgctgcacctgcagccactgcgctctgctgctggggccgccgccctggctttgaccgtggacctgccacccgcctcctccgaggctcggaactcggccttcggtttccagggccgcttgctgcacctgagtgccggccagcgcctgggcgtccatcttcacactgaggccagggcacgccatgcctggcagcttacccagggcgccacagtcttgggactcttccgggtgacccccgaaatcccagccggactcccttcaccgaggtcggaataaacccagctttcttgtacaaagtggttgatctagagggcccgcggttcgaaggtaagcctatccctaaccctctcctcggtctcgattctacgcgtaccggttagtaatgagtttaaacgggggaggctaactgaaacacggaaggagacaataccggaaggaacccgcgctatgacggcaataaaaagacagaataaaacgcacgggtgttgggtcgtttgttcataaacgcggggttcggtcccagggctggcactctgtcgataccccaccgagaccccattggggccaatacgcccgcgtttcttccttttccccaccccaccccccaagttcgggtgaaggcccagggctcgcagccaacgtcggggcggcaggccctgccatagcagatccgattcgacagatcactgaaatgtgtgggcgtggcttaagggtgggaaagaatatataaggtgggggtcttatgtagttttgtatctgttttgcagcagccgccgccgccatgagcaccaactcgtttgatggaagcattgtgagctcatatttgacaacgcgcatgcccccatgggccggggtgcgtcagaatgtgatgggctccagcattgatggtcgccccgtcctgcccgcaaactctactaccttgacctacgagaccgtgtctggaacgccgttggagactgcagcctccgccgccgcttcagccgctgcagccaccgcccgcgggattgtgactgactttgctttcctgagcccgcttgcaagcagtgcagcttcccgttcatccgcccgcgatgacaagttgacggctcttttggcacaattggattctttgacccgggaacttaatgtcgtttctcagcagctgttggatctgcgccagcaggtttctgccctgaaggcttcctcccctcccaatgcggtttaaaacataaataaaaaaccagactctgtttggatttggatcaagcaagtgtcttgctgtctttatttaggggttttgcgcgcgcggtaggcccgggaccagcggtctcggtcgttgagggtcctgtgtattttttccaggacgtggtaaaggtgactctggatgttcagatacatgggcataagcccgtctctggggtggaggtagcaccactgcagagcttcatgctgcggggtggtgttgtagatgatccagtcgtagcaggagcgctgggcgtggtgcctaaaaatgtctttcagtagcaagctgattgccaggggcaggcccttggtgtaagtgtttacaaagcggttaagctgggatgggtgcatacgtggggatatgagatgcatcttggactgtatttttaggttggctatgttcccagccatatccctccggggattcatgttgtgcagaaccaccagcacagtgtatccggtgcacttgggaaatttgtcatgtagcttagaaggaaatgcgtggaagaacttggagacgcccttgtgacctccaagattttccatgcattcgtccataatgatggcaatgggcccacgggcggcggcctgggcgaagatatttctgggatcactaacgtcatagttgtgttccaggatgagatcgtcataggccatttttacaaagcgcgggcggagggtgccagactgcggtataatggttccatccggcccaggggcgtagttaccctcacagatttgcatttcccacgctttgagttcagatggggggatcatgtctacctgcggggcgatgaagaaaacggtttccggggtaggggagatcagctgggaagaaagcaggttcctgagcagctgcgacttaccgcagccggtgggcccgtaaatcacacctattaccgggtgcaactggtagttaagagagctgcagctgccgtcatccctgagcaggggggccacttcgttaagcatgtccctgactcgcatgttttccctgaccaaatccgccagaaggcgctcgccgcccagcgatagcagttcttgcaaggaagcaaagtttttcaacggtttgagaccgtccgccgtaggcatgcttttgagcgtttgaccaagcagttccaggcggtcccacagctcggtcacctgctctacggcatctcgatccagcatatctcctcgtttcgcgggttggggcggctttcgctgtacggcagtagtcggtgctcgtccagacgggccagggtcatgtctttccacgggcgcagggtcctcgtcagcgtagtctgggtcacggtgaaggggtgcgctccgggctgcgcgctggccagggtgcgcttgaggctggtcctgctggtgctgaagcgctgccggtcttcgccctgcgcgtcggccaggtagcatttgaccatggtgtcatagtccagcccctccgcggcgtggcccttggcgcgcagcttgcccttggaggaggcgccgcacgaggggcagtgcagacttttgagggcgtagagcttgggcgcgagaaataccgattccggggagtaggcatccgcgccgcaggccccgcagacggtctcgcattccacgagccaggtgagctctggccgttcggggtcaaaaaccaggtttcccccatgctttttgatgcgtttcttacctctggtttccatgagccggtgtccacgctcggtgacgaaaaggctgtccgtgtccccgtatacagacttgagaggcctgtcctcgagcggtgttccgcggtcctcctcgtatagaaactcggaccactctgagacaaaggctcgcgtccaggccagcacgaaggaggctaagtgggaggggtagcggtcgttgtccactagggggtccactcgctccagggtgtgaagacacatgtcgccctcttcggcatcaaggaaggtgattggtttgtaggtgtaggccacgtgaccgggtgttcctgaaggggggctataaaagggggtgggggcgcgttcgtcctcactctcttccgcatcgctgtctgcgagggccagctgttggggtgagtactccctctgaaaagcgggcatgacttctgcgctaagattgtcagtttccaaaaacgaggaggatttgatattcacctggcccgcggtgatgcctttgagggtggccgcatccatctggtcagaaaagacaatctttttgttgtcaagcttggtggcaaacgacccgtagagggcgttggacagcaacttggcgatggagcgcagggtttggtttttgtcgcgatcggcgcgctccttggccgcgatgtttagctgcacgtattcgcgcgcaacgcaccgccattcgggaaagacggtggtgcgctcgtcgggcaccaggtgcacgcgccaaccgcggttgtgcagggtgacaaggtcaacgctggtggctacctctccgcgtaggcgctcgttggtccagcagaggcggccgcccttgcgcgagcagaatggcggtagggggtctagctgcgtctcgtccggggggtctgcgtccacggtaaagaccccgggcagcaggcgcgcgtcgaagtagtctatcttgcatccttgcaagtctagcgcctgctgccatgcgcgggcggcaagcgcgcgctcgtatgggttgagtgggggaccccatggcatggggtgggtgagcgcggaggcgtacatgccgcaaatgtcgtaaacgtagaggggctctctgagtattccaagatatgtagggtagcatcttccaccgcggatgctggcgcgcacgtaatcgtatagttcgtgcgagggagcgaggaggtcgggaccgaggttgctacgggcgggctgctctgctcggaagactatctgcctgaagatggcatgtgagttggatgatatggttggacgctggaagacgttgaagctggcgtctgtgagacctaccgcgtcacgcacgaaggaggcgtaggagtcgcgcagcttgttgaccagctcggcggtgacctgcacgtctagggcgcagtagtccagggtttccttgatgatgtcatacttatcctgtcccttttttttccacagctcgcggttgaggacaaactcttcgcggtctttccagtactcttggatcggaaacccgtcggcctccgaacggtaagagcctagcatgtagaactggttgacggcctggtaggcgcagcatcccttttctacgggtagcgcgtatgcctgcgcggccttccggagcgaggtgtgggtgagcgcaaaggtgtccctgaccatgactttgaggtactggtatttgaagtcagtgtcgtcgcatccgccctgctcccagagcaaaaagtccgtgcgctttttggaacgcggatttggcagggcgaaggtgacatcgttgaagagtatctttcccgcgcgaggcataaagttgcgtgtgatgcggaagggtcccggcacctcggaacggttgttaattacctgggcggcgagcacgatctcgtcaaagccgttgatgttgtggcccacaatgtaaagttccaagaagcgcgggatgcccttgatggaaggcaattttttaagttcctcgtaggtgagctcttcaggggagctgagcccgtgctctgaaagggcccagtctgcaagatgagggttggaagcgacgaatgagctccacaggtcacgggccattagcatttgcaggtggtcgcgaaaggtcctaaactggcgacctatggccattttttctggggtgatgcagtagaaggtaagcgggtcttgttcccagcggtcccatccaaggttcgcggctaggtctcgcgcggcagtcactagaggctcatctccgccgaacttcatgaccagcatgaagggcacgagctgcttcccaaaggcccccatccaagtataggtctctacatcgtaggtgacaaagagacgctcggtgcgaggatgcgagccgatcgggaagaactggatctcccgccaccaattggaggagtggctattgatgtggtgaaagtagaagtccctgcgacgggccgaacactcgtgctggcttttgtaaaaacgtgcgcagtactggcagcggtgcacgggctgtacatcctgcacgaggttgacctgacgaccgcgcacaaggaagcagagtgggaatttgagcccctcgcctggcgggtttggctggtggtcttctacttcggctgcttgtccttgaccgtctggctgctcgaggggagttacggtggatcggaccaccacgccgcgcgagcccaaagtccagatgtccgcgcgcggcggtcggagcttgatgacaacatcgcgcagatgggagctgtccatggtctggagctcccgcggcgtcaggtcaggcgggagctcctgcaggtttacctcgcatagacgggtcagggcgcgggctagatccaggtgatacctaatttccaggggctggttggtggcggcgtcgatggcttgcaagaggccgcatccccgcggcgcgactacggtaccgcgcggcgggcggtgggccgcgggggtgtccttggatgatgcatctaaaagcggtgacgcgggcgagcccccggaggtagggggggctccggacccgccgggagagggggcaggggcacgtcggcgccgcgcgcgggcaggagctggtgctgcgcgcgtaggttgctggcgaacgcgacgacgcggcggttgatctcctgaatctggcgcctctgcgtgaagacgacgggcccggtgagcttgagcctgaaagagagttcgacagaatcaatttcggtgtcgttgacggcggcctggcgcaaaatctcctgcacgtctcctgagttgtcttgataggcgatctcggccatgaactgctcgatctcttcctcctggagatctccgcgtccggctcgctccacggtggcggcgaggtcgttggaaatgcgggccatgagctgcgagaaggcgttgaggcctccctcgttccagacgcggctgtagaccacgcccccttcggcatcgcgggcgcgcatgaccacctgcgcgagattgagctccacgtgccgggcgaagacggcgtagtttcgcaggcgctgaaagaggtagttgagggtggtggcggtgtgttctgccacgaagaagtacataacccagcgtcgcaacgtggattcgttgatatcccccaaggcctcaaggcgctccatggcctcgtagaagtccacggcgaagttgaaaaactgggagttgcgcgccgacacggttaactcctcctccagaagacggatgagctcggcgacagtgtcgcgcacctcgcgctcaaaggctacaggggcctcttcttcttcttcaatctcctcttccataagggcctccccttcttcttcttctggcggcggtgggggaggggggacacggcggcgacgacggcgcaccgggaggcggtcgacaaagcgctcgatcatctccccgcggcgacggcgcatggtctcggtgacggcgcggccgttctcgcgggggcgcagttggaagacgccgcccgtcatgtcccggttatgggttggcggggggctgccatgcggcagggatacggcgctaacgatgcatctcaacaattgttgtgtaggtactccgccgccgagggacctgagcgagtccgcatcgaccggatcggaaaacctctcgagaaaggcgtctaaccagtcacagtcgcaaggtaggctgagcaccgtggcgggcggcagcgggcggcggtcggggttgtttctggcggaggtgctgctgatgatgtaattaaagtaggcggtcttgagacggcggatggtcgacagaagcaccatgtccttgggtccggcctgctgaatgcgcaggcggtcggccatgccccaggcttcgttttgacatcggcgcaggtctttgtagtagtcttgcatgagcctttctaccggcacttcttcttctccttcctcttgtcctgcatctcttgcatctatcgctgcggcggcggcggagtttggccgtaggtggcgccctcttcctcccatgcgtgtgaccccgaagcccctcatcggctgaagcagggctaggtcggcgacaacgcgctcggctaatatggcctgctgcacctgcgtgagggtagactggaagtcatccatgtccacaaagcggtggtatgcgcccgtgttgatggtgtaagtgcagttggccataacggaccagttaacggtctggtgacccggctgcgagagctcggtgtacctgagacgcgagtaagccctcgagtcaaatacgtagtcgttgcaagtccgcaccaggtactggtatcccaccaaaaagtgcggcggcggctggcggtagaggggccagcgtagggtggccggggctccgggggcgagatcttccaacataaggcgatgatatccgtagatgtacctggacatccaggtgatgccggcggcggtggtggaggcgcgcggaaagtcgcggacgcggttccagatgttgcgcagcggcaaaaagtgctccatggtcgggacgctctggccggtcaggcgcgcgcaatcgttgacgctctagaccgtgcaaaaggagagcctgtaagcgggcactcttccgtggtctggtggataaattcgcaagggtatcatggcggacgaccggggttcgagccccgtatccggccgtccgccgtgatccatgcggttaccgcccgcgtgtcgaacccaggtgtgcgacgtcagacaacgggggagtgctccttttggcttccttccaggcgcggcggctgctgcgctagcttttttggccactggccgcgcgcagcgtaagcggttaggctggaaagcgaaagcattaagtggctcgctccctgtagccggagggttattttccaagggttgagtcgcgggacccccggttcgagtctcggaccggccggactgcggcgaacgggggtttgcctccccgtcatgcaagaccccgcttgcaaattcctccggaaacagggacgagccccttttttgcttttcccagatgcatccggtgctgcggcagatgcgcccccctcctcagcagcggcaagagcaagagcagcggcagacatgcagggcaccctcccctcctcctaccgcgtcaggaggggcgacatccgcggttgacgcggcagcagatggtgattacgaacccccgcggcgccgggcccggcactacctggacttggaggagggcgagggcctggcgcggctaggagcgccctctcctgagcggtacccaagggtgcagctgaagcgtgatacgcgtgaggcgtacgtgccgcggcagaacctgtttcgcgaccgcgagggagaggagcccgaggagatgcgggatcgaaagttccacgcagggcgcgagctgcggcatggcctgaatcgcgagcggttgctgcgcgaggaggactttgagcccgacgcgcgaaccgggattagtcccgcgcgcgcacacgtggcggccgccgacctggtaaccgcatacgagcagacggtgaaccaggagattaactttcaaaaaagctttaacaaccacgtgcgtacgcttgtggcgcgcgaggaggtggctataggactgatgcatctgtgggactttgtaagcgcgctggagcaaaacccaaatagcaagccgctcatggcgcagctgttccttatagtgcagcacagcagggacaacgaggcattcagggatgcgctgctaaacatagtagagcccgagggccgctggctgctcgatttgataaacatcctgcagagcatagtggtgcaggagcgcagcttgagcctggctgacaaggtggccgccatcaactattccatgcttagcctgggcaagttttacgcccgcaagatataccataccccttacgttcccatagacaaggaggtaaagatcgaggggttctacatgcgcatggcgctgaaggtgcttaccttgagcgacgacctgggcgtttatcgcaacgagcgcatccacaaggccgtgagcgtgagccggcggcgcgagctcagcgaccgcgagctgatgcacagcctgcaaagggccctggctggcacgggcagcggcgatagagaggccgagtcctactttgacgcgggcgctgacctgcgctgggccccaagccgacgcgccctggaggcagctggggccggacctgggctggcggtggcacccgcgcgcgctggcaacgtcggcggcgtggaggaatatgacgaggacgatgagtacgagccagaggacggcgagtactaagcggtgatgtttctgatcagatgatgcaagacgcaacggacccggcggtgcgggcggcgctgcagagccagccgtccggccttaactccacggacgactggcgccaggtcatggaccgcatcatgtcgctgactgcgcgcaatcctgacgcgttccggcagcagccgcaggccaaccggctctccgcaattctggaagcggtggtcccggcgcgcgcaaaccccacgcacgagaaggtgctggcgatcgtaaacgcgctggccgaaaacagggccatccggcccgacgaggccggcctggtctacgacgcgctgcttcagcgcgtggctcgttacaacagcggcaacgtgcagaccaacctggaccggctggtgggggatgtgcgcgaggccgtggcgcagcgtgagcgcgcgcagcagcagggcaacctgggctccatggttgcactaaacgccttcctgagtacacagcccgccaacgtgccgcggggacaggaggactacaccaactttgtgagcgcactgcggctaatggtgactgagacaccgcaaagtgaggtgtaccagtctgggccagactattttttccagaccagtagacaaggcctgcagaccgtaaacctgagccaggctttcaaaaacttgcaggggctgtggggggtgcgggctcccacaggcgaccgcgcgaccgtgtctagcttgctgacgcccaactcgcgcctgttgctgctgctaatagcgcccttcacggacagtggcagcgtgtcccgggacacatacctaggtcacttgctgacactgtaccgcgaggccataggtcaggcgcatgtggacgagcatactttccaggagattacaagtgtcagccgcgcgctggggcaggaggacacgggcagcctggaggcaaccctaaactacctgctgaccaaccggcggcagaagatcccctcgttgcacagtttaaacagcgaggaggagcgcattttgcgctacgtgcagcagagcgtgagccttaacctgatgcgcgacggggtaacgcccagcgtggcgctggacatgaccgcgcgcaacatggaaccgggcatgtatgcctcaaaccggccgtttatcaaccgcctaatggactacttgcatcgcgcggccgccgtgaaccccgagtatttcaccaatgccatcttgaacccgcactggctaccgccccctggtttctacaccgggggattcgaggtgcccgagggtaacgatggattcctctgggacgacatagacgacagcgtgttttccccgcaaccgcagaccctgctagagttgcaacagcgcgagcaggcagaggcggcgctgcgaaaggaaagcttccgcaggccaagcagcttgtccgatctaggcgctgcggccccgcggtcagatgctagtagcccatttccaagcttgatagggtctcttaccagcactcgcaccacccgcccgcgcctgctgggcgaggaggagtacctaaacaactcgctgctgcagccgcagcgcgaaaaaaacctgcctccggcatttcccaacaacgggatagagagcctagtggacaagatgagtagatggaagacgtacgcgcaggagcacagggacgtgccaggcccgcgcccgcccacccgtcgtcaaaggcacgaccgtcagcggggtctggtgtgggaggacgatgactcggcagacgacagcagcgtcctggatttgggagggagtggcaacccgtttgcgcaccttcgccccaggctggggagaatgttttaaaaaaaaaaaagcatgatgcaaaataaaaaactcaccaaggccatggcaccgagcgttggttttcttgtattccccttagtatgcggcgcgcggcgatgtatgaggaaggtcctcctccctcctacgagagtgtggtgagcgcggcgccagtggcggcggcgctgggttctcccttcgatgctcccctggacccgccgtttgtgcctccgcggtacctgcggcctaccggggggagaaacagcatccgttactctgagttggcacccctattcgacaccacccgtgtgtacctggtggacaacaagtcaacggatgtggcatccctgaactaccagaacgaccacagcaactttctgaccacggtcattcaaaacaatgactacagcccgggggaggcaagcacacagaccatcaatcttgacgaccggtcgcactggggcggcgacctgaaaaccatcctgcataccaacatgccaaatgtgaacgagttcatgtttaccaataagtttaaggcgcgggtgatggtgtcgcgcttgcctactaaggacaatcaggtggagctgaaatacgagtgggtggagttcacgctgcccgagggcaactactccgagaccatgaccatagaccttatgaacaacgcgatcgtggagcactacttgaaagtgggcagacagaacggggttctggaaagcgacatcggggtaaagtttgacacccgcaacttcagactggggtttgaccccgtcactggtcttgtcatgcctggggtatatacaaacgaagccttccatccagacatcattttgctgccaggatgcggggtggacttcacccacagccgcctgagcaacttgttgggcatccgcaagcggcaacccttccaggagggctttaggatcacctacgatgatctggagggtggtaacattcccgcactgttggatgtggacgcctaccaggcgagcttgaaagatgacaccgaacagggcgggggtggcgcaggcggcagcaacagcagtggcagcggcgcggaagagaactccaacgcggcagccgcggcaatgcagccggtggaggacatgaacgatcatgccattcgcggcgacacctttgccacacgggctgaggagaagcgcgctgaggccgaagcagcggccgaagctgccgcccccgctgcgcaacccgaggtcgagaagcctcagaagaaaccggtgatcaaacccctgacagaggacagcaagaaacgcagttacaacctaataagcaatgacagcaccttcacccagtaccgcagctggtaccttgcatacaactacggcgaccctcagaccggaatccgctcatggaccctgctttgcactcctgacgtaacctgcggctcggagcaggtctactggtcgttgccagacatgatgcaagaccccgtgaccttccgctccacgcgccagatcagcaactttccggtggtgggcgccgagctgttgcccgtgcactccaagagcttctacaacgaccaggccgtctactcccaactcatccgccagtttacctctctgacccacgtgttcaatcgctttcccgagaaccagattttggcgcgcccgccagcccccaccatcaccaccgtcagtgaaaacgttcctgctctcacagatcacgggacgctaccgctgcgcaacagcatcggaggagtccagcgagtgaccattactgacgccagacgccgcacctgcccctacgtttacaaggccctgggcatagtctcgccgcgcgtcctatcgagccgcactttttgagcaagcatgtccatccttatatcgcccagcaataacacaggctggggcctgcgcttcccaagcaagatgtttggcggggccaagaagcgctccgaccaacacccagtgcgcgtgcgcgggcactaccgcgcgccctggggcgcgcacaaacgcggccgcactgggcgcaccaccgtcgatgacgccatcgacgcggtggtggaggaggcgcgcaactacacgcccacgccgccaccagtgtccacagtggacgcggccattcagaccgtggtgcgcggagcccggcgctatgctaaaatgaagagacggcggaggcgcgtagcacgtcgccaccgccgccgacccggcactgccgcccaacgcgcggcggcggccctgcttaaccgcgcacgtcgcaccggccgacgggcggccatgcgggccgctcgaaggctggccgcgggtattgtcactgtgccccccaggtccaggcgacgagcggccgccgcagcagccgcggccattagtgctatgactcagggtcgcaggggcaacgtgtattgggtgcgcgactcggttagcggcctgcgcgtgcccgtgcgcacccgccccccgcgcaactagattgcaagaaaaaactacttagactcgtactgttgtatgtatccagcggcggcggcgcgcaacgaagctatgtccaagcgcaaaatcaaagaagagatgctccaggtcatcgcgccggagatctatggccccccgaagaaggaagagcaggattacaagccccgaaagctaaagcgggtcaaaaagaaaaagaaagatgatgatgatgaacttgacgacgaggtggaactgctgcacgctaccgcgcccaggcgacgggtacagtggaaaggtcgacgcgtaaaacgtgttttgcgacccggcaccaccgtagtctttacgcccggtgagcgctccacccgcacctacaagcgcgtgtatgatgaggtgtacggcgacgaggacctgcttgagcaggccaacgagcgcctcggggagtttgcctacggaaagcggcataaggacatgctggcgttgccgctggacgagggcaacccaacacctagcctaaagcccgtaacactgcagcaggtgctgcccgcgcttgcaccgtccgaagaaaagcgcggcctaaagcgcgagtctggtgacttggcacccaccgtgcagctgatggtacccaagcgccagcgactggaagatgtcttggaaaaaatgaccgtggaacctgggctggagcccgaggtccgcgtgcggccaatcaagcaggtggcgccgggactgggcgtgcagaccgtggacgttcagatacccactaccagtagcaccagtattgccaccgccacagagggcatggagacacaaacgtccccggttgcctcagcggtggcggatgccgcggtgcaggcggtcgctgcggccgcgtccaagacctctacggaggtgcaaacggacccgtggatgtttcgcgtttcagccccccggcgcccgcgcggttcgaggaagtacggcgccgccagcgcgctactgcccgaatatgccctacatccttccattgcgcctacccccggctatcgtggctacacctaccgccccagaagacgagcaactacccgacgccgaaccaccactggaacccgccgccgccgtcgccgtcgccagcccgtgctggccccgatttccgtgcgcagggtggctcgcgaaggaggcaggaccctggtgctgccaacagcgcgctaccaccccagcatcgtttaaaagccggtctttgtggttcttgcagatatggccctcacctgccgcctccgtttcccggtgccgggattccgaggaagaatgcaccgtaggaggggcatggccggccacggcctgacgggcggcatgcgtcgtgcgcaccaccggcggcggcgcgcgtcgcaccgtcgcatgcgcggcggtatcctgcccctccttattccactgatcgccgcggcgattggcgccgtgcccggaattgcatccgtggccttgcaggcgcagagacactgattaaaaacaagttgcatgtggaaaaatcaaaataaaaagtctggactctcacgctcgcttggtcctgtaactattttgtagaatggaagacatcaactttgcgtctctggccccgcgacacggctcgcgcccgttcatgggaaactggcaagatatcggcaccagcaatatgagcggtggcgccttcagctggggctcgctgtggagcggcattaaaaatttcggttccaccgttaagaactatggcagcaaggcctggaacagcagcacaggccagatgctgagggataagttgaaagagcaaaatttccaacaaaaggtggtagatggcctggcctctggcattagcggggtggtggacctggccaaccaggcagtgcaaaataagattaacagtaagcttgatccccgccctcccgtagaggagcctccaccggccgtggagacagtgtctccagaggggcgtggcgaaaagcgtccgcgccccgacagggaagaaactctggtgacgcaaatagacgagcctccctcgtacgaggaggcactaaagcaaggcctgcccaccacccgtcccatcgcgcccatggctaccggagtgctgggccagcacacacccgtaacgctggacctgcctccccccgccgacacccagcagaaacctgtgctgccaggcccgaccgccgttgttgtaacccgtcctagccgcgcgtccctgcgccgcgccgccagcggtccgcgatcgttgcggcccgtagccagtggcaactggcaaagcacactgaacagcatcgtgggtctgggggtgcaatccctgaagcgccgacgatgcttctgaatagctaacgtgtcgtatgtgtgtcatgtatgcgtccatgtcgccgccagaggagctgctgagccgccgcgcgcccgctttccaagatggctaccccttcgatgatgccgcagtggtcttacatgcacatctcgggccaggacgcctcggagtacctgagccccgggctggtgcagtttgcccgcgccaccgagacgtacttcagcctgaataacaagtttagaaaccccacggtggcgcctacgcacgacgtgaccacagaccggtcccagcgtttgacgctgcggttcatccctgtggaccgtgaggatactgcgtactcgtacaaggcgcggttcaccctagctgtgggtgataaccgtgtgctggacatggcttccacgtactttgacatccgcggcgtgctggacaggggccctacttttaagccctactctggcactgcctacaacgccctggctcccaagggtgccccaaatccttgcgaatgggatgaagctgctactgctcttgaaataaacctagaagaagaggacgatgacaacgaagacgaagtagacgagcaagctgagcagcaaaaaactcacgtatttgggcaggcgccttattctggtataaatattacaaaggagggtattcaaataggtgtcgaaggtcaaacacctaaatatgccgataaaacatttcaacctgaacctcaaataggagaatctcagtggtacgaaactgaaattaatcatgcagctgggagagtccttaaaaagactaccccaatgaaaccatgttacggttcatatgcaaaacccacaaatgaaaatggagggcaaggcattcttgtaaagcaacaaaatggaaagctagaaagtcaagtggaaatgcaatttttctcaactactgaggcgaccgcaggcaatggtgataacttgactcctaaagtggtattgtacagtgaagatgtagatatagaaaccccagacactcatatttcttacatgcccactattaaggaaggtaactcacgagaactaatgggccaacaatctatgcccaacaggcctaattacattgcttttagggacaattttattggtctaatgtattacaacagcacgggtaatatgggtgttctggcgggccaagcatcgcagttgaatgctgttgtagatttgcaagacagaaacacagagctttcataccagcttttgcttgattccattggtgatagaaccaggtacttttctatgtggaatcaggctgttgacagctatgatccagatgttagaattattgaaaatcatggaactgaagatgaacttccaaattactgctttccactgggaggtgtgattaatacagagactcttaccaaggtaaaacctaaaacaggtcaggaaaatggatgggaaaaagatgctacagaattttcagataaaaatgaaataagagttggaaataattttgccatggaaatcaatctaaatgccaacctgtggagaaatttcctgtactccaacatagcgctgtatttgcccgacaagctaaagtacagtccttccaacgtaaaaatttctgataacccaaacacctacgactacatgaacaagcgagtggtggctcccgggttagtggactgctacattaaccttggagcacgctggtcccttgactatatggacaacgtcaacccatttaaccaccaccgcaatgctggcctgcgctaccgctcaatgttgctgggcaatggtcgctatgtgcccttccacatccaggtgcctcagaagttctttgccattaaaaacctccttctcctgccgggctcatacacctacgagtggaacttcaggaaggatgttaacatggttctgcagagctccctaggaaatgacctaagggttgacggagccagcattaagtttgatagcatttgcctttacgccaccttcttccccatggcccacaacaccgcctccacgcttgaggccatgcttagaaacgacaccaacgaccagtcctttaacgactatctctccgccgccaacatgctctaccctatacccgccaacgctaccaacgtgcccatatccatcccctcccgcaactgggcggctttccgcggctgggccttcacgcgccttaagactaaggaaaccccatcactgggctcgggctacgacccttattacacctactctggctctataccctacctagatggaaccttttacctcaaccacacctttaagaaggtggccattacctttgactcttctgtcagctggcctggcaatgaccgcctgcttacccccaacgagtttgaaattaagcgctcagttgacggggagggttacaacgttgcccagtgtaacatgaccaaagactggttcctggtacaaatgctagctaactacaacattggctaccagggcttctatatcccagagagctacaaggaccgcatgtactccttctttagaaacttccagcccatgagccgtcaggtggtggatgatactaaatacaaggactaccaacaggtgggcatcctacaccaacacaacaactctggatttgttggctaccttgcccccaccatgcgcgaaggacaggcctaccctgctaacttcccctatccgcttataggcaagaccgcagttgacagcattacccagaaaaagtttctttgcgatcgcaccctttggcgcatcccattctccagtaactttatgtccatgggcgcactcacagacctgggccaaaaccttctctacgccaactccgcccacgcgctagacatgacttttgaggtggatcccatggacgagcccacccttctttatgttttgtttgaagtctttgacgtggtccgtgtgcaccggccgcaccgcggcgtcatcgaaaccgtgtacctgcgcacgcccttctcggccggcaacgccacaacataaagaagcaagcaacatcaacaacagctgccgccatgggctccagtgagcaggaactgaaagccattgtcaaagatcttggttgtgggccatattttttgggcacctatgacaagcgctttccaggctttgtttctccacacaagctcgcctgcgccatagtcaatacggccggtcgcgagactgggggcgtacactggatggcctttgcctggaacccgcactcaaaaacatgctacctctttgagccctttggcttttctgaccagcgactcaagcaggtttaccagtttgagtacgagtcactcctgcgccgtagcgccattgcttcttcccccgaccgctgtataacgctggaaaagtccacccaaagcgtacaggggcccaactcggccgcctgtggactattctgctgcatgtttctccacgcctttgccaactggccccaaactcccatggatcacaaccccaccatgaaccttattaccggggtacccaactccatgctcaacagtccccaggtacagcccaccctgcgtcgcaaccaggaacagctctacagcttcctggagcgccactcgccctacttccgcagccacagtgcgcagattaggagcgccacttctttttgtcacttgaaaaacatgtaaaaataatgtactagagacactttcaataaaggcaaatgcttttatttgtacactctcgggtgattatttacccccacccttgccgtctgcgccgtttaaaaatcaaaggggttctgccgcgcatcgctatgcgccactggcagggacacgttgcgatactggtgtttagtgctccacttaaactcaggcacaaccatccgcggcagctcggtgaagttttcactccacaggctgcgcaccatcaccaacgcgtttagcaggtcgggcgccgatatcttgaagtcgcagttggggcctccgccctgcgcgcgcgagttgcgatacacagggttgcagcactggaacactatcagcgccgggtggtgcacgctggccagcacgctcttgtcggagatcagatccgcgtccaggtcctccgcgttgctcagggcgaacggagtcaactttggtagctgccttcccaaaaagggcgcgtgcccaggctttgagttgcactcgcaccgtagtggcatcaaaaggtgaccgtgcccggtctgggcgttaggatacagcgcctgcataaaagccttgatctgcttaaaagccacctgagcctttgcgccttcagagaagaacatgccgcaagacttgccggaaaactgattggccggacaggccgcgtcgtgcacgcagcaccttgcgtcggtgttggagatctgcaccacatttcggccccaccggttcttcacgatcttggccttgctagactgctccttcagcgcgcgctgcccgttttcgctcgtcacatccatttcaatcacgtgctccttatttatcataatgcttccgtgtagacacttaagctcgccttcgatctcagcgcagcggtgcagccacaacgcgcagcccgtgggctcgtgatgcttgtaggtcacctctgcaaacgactgcaggtacgcctgcaggaatcgccccatcatcgtcacaaaggtcttgttgctggtgaaggtcagctgcaacccgcggtgctcctcgttcagccaggtcttgcatacggccgccagagcttccacttggtcaggcagtagtttgaagttcgcctttagatcgttatccacgtggtacttgtccatcagcgcgcgcgcagcctccatgcccttctcccacgcagacacgatcggcacactcagcgggttcatcaccgtaatttcactttccgcttcgctgggctcttcctcttcctcttgcgtccgcataccacgcgccactgggtcgtcttcattcagccgccgcactgtgcgcttacctcctttgccatgcttgattagcaccggtgggttgctgaaacccaccatttgtagcgccacatcttctctttcttcctcgctgtccacgattacctctggtgatggcgggcgctcgggcttgggagaagggcgcttctttttcttcttgggcgcaatggccaaatccgccgccgaggtcgatggccgcgggctgggtgtgcgcggcaccagcgcgtcttgtgatgagtcttcctcgtcctcggactcgatacgccgcctcatccgcttttttgggggcgcccggggaggcggcggcgacggggacggggacgacacgtcctccatggttgggggacgtcgcgccgcaccgcgtccgcgctcgggggtggtttcgcgctgctcctcttcccgactggccatttccttctcctataggcagaaaaagatcatggagtcagtcgagaagaaggacagcctaaccgccccctctgagttcgccaccaccgcctccaccgatgccgccaacgcgcctaccaccttccccgtcgaggcacccccgcttgaggaggaggaagtgattatcgagcaggacccaggttttgtaagcgaagacgacgaggaccgctcagtaccaacagaggataaaaagcaagaccaggacaacgcagaggcaaacgaggaacaagtcgggcggggggacgaaaggcatggcgactacctagatgtgggagacgacgtgctgttgaagcatctgcagcgccagtgcgccattatctgcgacgcgttgcaagagcgcagcgatgtgcccctcgccatagcggatgtcagccttgcctacgaacgccacctattctcaccgcgcgtaccccccaaacgccaagaaaacggcacatgcgagcccaacccgcgcctcaacttctaccccgtatttgccgtgccagaggtgcttgccacctatcacatctttttccaaaactgcaagatacccctatcctgccgtgccaaccgcagccgagcggacaagcagctggccttgcggcagggcgctgtcatacctgatatcgcctcgctcaacgaagtgccaaaaatctttgagggtcttggacgcgacgagaagcgcgcggcaaacgctctgcaacaggaaaacagcgaaaatgaaagtcactctggagtgttggtggaactcgagggtgacaacgcgcgcctagccgtactaaaacgcagcatcgaggtcacccactttgcctacccggcacttaacctaccccccaaggtcatgagcacagtcatgagtgagctgatcgtgcgccgtgcgcagcccctggagagggatgcaaatttgcaagaacaaacagaggagggcctacccgcagttggcgacgagcagctagcgcgctggcttcaaacgcgcgagcctgccgacttggaggagcgacgcaaactaatgatggccgcagtgctcgttaccgtggagcttgagtgcatgcagcggttctttgctgacccggagatgcagcgcaagctagaggaaacattgcactacacctttcgacagggctacgtacgccaggcctgcaagatctccaacgtggagctctgcaacctggtctcctaccttggaattttgcacgaaaaccgccttgggcaaaacgtgcttcattccacgctcaagggcgaggcgcgccgcgactacgtccgcgactgcgtttacttatttctatgctacacctggcagacggccatgggcgtttggcagcagtgcttggaggagtgcaacctcaaggagctgcagaaactgctaaagcaaaacttgaaggacctatggacggccttcaacgagcgctccgtggccgcgcacctggcggacatcattttccccgaacgcctgcttaaaaccctgcaacagggtctgccagacttcaccagtcaaagcatgttgcagaactttaggaactttatcctagagcgctcaggaatcttgcccgccacctgctgtgcacttcctagcgactttgtgcccattaagtaccgcgaatgccctccgccgctttggggccactgctaccttctgcagctagccaactaccttgcctaccactctgacataatggaagacgtgagcggtgacggtctactggagtgtcactgtcgctgcaacctatgcaccccgcaccgctccctggtttgcaattcgcagctgcttaacgaaagtcaaattatcggtacctttgagctgcagggtccctcgcctgacgaaaagtccgcggctccggggttgaaactcactccggggctgtggacgtcggcttaccttcgcaaatttgtacctgaggactaccacgcccacgagattaggttctacgaagaccaatcccgcccgccaaatgcggagcttaccgcctgcgtcattacccagggccacattcttggccaattgcaagccatcaacaaagcccgccaagagtttctgctacgaaagggacggggggtttacttggacccccagtccggcgaggagctcaacccaatccccccgccgccgcagccctatcagcagcagccgcgggcccttgcttcccaggatggcacccaaaaagaagctgcagctgccgccgccacccacggacgaggaggaatactgggacagtcaggcagaggaggttttggacgaggaggaggaggacatgatggaagactgggagagcctagacgaggaagcttccgaggtcgaagaggtgtcagacgaaacaccgtcaccctcggtcgcattcccctcgccggcgccccagaaatcggcaaccggttccagcatggctacaacctccgctcctcaggcgccgccggcactgcccgttcgccgacccaaccgtagatgggacaccactggaaccagggccggtaagtccaagcagccgccgccgttagcccaagagcaacaacagcgccaaggctaccgctcatggcgcgggcacaagaacgccatagttgcttgcttgcaagactgtgggggcaacatctccttcgcccgccgctttcttctctaccatcacggcgtggccttcccccgtaacatcctgcattactaccgtcatctctacagcccatactgcaccggcggcagcggcagcggcagcaacagcagcggccacacagaagcaaaggcgaccggatagcaagactctgacaaagcccaagaaatccacagcggcggcagcagcaggaggaggagcgctgcgtctggcgcccaacgaacccgtatcgacccgcgagcttagaaacaggatttttcccactctgtatgctatatttcaacagagcaggggccaagaacaagagctgaaaataaaaaacaggtctctgcgatccctcacccgcagctgcctgtatcacaaaagcgaagatcagcttcggcgcacgctggaagacgcggaggctctcttcagtaaatactgcgcgctgactcttaaggactagtttcgcgccctttctcaaatttaagcgcgaaaactacgtcatctccagcggccacacccggcgccagcacctgtcgtcagcgccattatgagcaaggaaattcccacgccctacatgtggagttaccagccacaaatgggacttgcggctggagctgcccaagactactcaacccgaataaactacatgagcgcgggaccccacatgatatcccgggtcaacggaatccgcgcccaccgaaaccgaattctcttggaacaggcggctattaccaccacacctcgtaataaccttaatccccgtagttggcccgctgccctggtgtaccaggaaagtcccgctcccaccactgtggtacttcccagagacgcccaggccgaagttcagatgactaactcaggggcgcagcttgcgggcggctttcgtcacagggtgcggtcgcccgggcagggtataactcacctgacaatcagagggcgaggtattcagctcaacgacgagtcggtgagctcctcgcttggtctccgtccggacgggacatttcagatcggcggcgccggccgtccttcattcacgcctcgtcaggcaatcctaactctgcagacctcgtcctctgagccgcgctctggaggcattggaactctgcaatttattgaggagtttgtgccatcggtctactttaaccccttctcgggacctcccggccactatccggatcaatttattcctaactttgacgcggtaaaggactcggcggacggctacgactgaatgttaagtggagaggcagagcaactgcgcctgaaacacctggtccactgtcgccgccacaagtgctttgcccgcgactccggtgagttttgctactttgaattgcccgaggatcatatcgagggcccggcgcacggcgtccggcttaccgcccagggagagcttgcccgtagcctgattcgggagtttacccagcgccccctgctagttgagcgggacaggggaccctgtgttctcactgtgatttgcaactgtcctaaccttggattacatcaagatctttgttgccatctctgtgctgagtataataaatacagaaattaaaatatactggggctcctatcgccatcctgtaaacgccaccgtcttcacccgcccaagcaaaccaaggcgaaccttacctggtacttttaacatctctccctctgtgatttacaacagtttcaacccagacggagtgagtctacgagagaacctctccgagctcagctactccatcagaaaaaacaccaccctccttacctgccgggaacgtacgagtgcgtcaccggccgctgcaccacacctaccgcctgaccgtaaaccagactttttccggacagacctcaataactctgtttaccagaacaggaggtgagcttagaaaacccttagggtattaggccaaaggcgcagctactgtggggtttatgaacaattcaagcaactctacgggctattctaattcaggtttctctagaaatggacggaattattacagagcagcgcctgctagaaagacgcagggcagcggccgagcaacagcgcatgaatcaagagctccaagacatggttaacttgcaccagtgcaaaaggggtatcttttgtctggtaaagcaggccaaagtcacctacgacagtaataccaccggacaccgccttagctacaagttgccaaccaagcgtcagaaattggtggtcatggtgggagaaaagcccattaccataactcagcactcggtagaaaccgaaggctgcattcactcaccttgtcaaggacctgaggatctctgcacccttattaagaccctgtgcggtctcaaagatcttattccctttaactaataaaaaaaaataataaagcatcacttacttaaaatcagttagcaaatttctgtccagtttattcagcagcacctccttgccctcctcccagctctggtattgcagcttcctcctggctgcaaactttctccacaatctaaatggaatgtcagtttcctcctgttcctgtccatccgcacccactatcttcatgttgttgcagatgaagcgcgcaagaccgtctgaagataccttcaaccccgtgtatccatatgacacggaaaccggtcctccaactgtgccttttcttactcctccctttgtatcccccaatgggtttcaagagagtccccctggggtactctctttgcgcctatccgaacctctagttacctccaatggcatgcttgcgctcaaaatgggcaacggcctctctctggacgaggccggcaaccttacctcccaaaatgtaaccactgtgagcccacctctcaaaaaaaccaagtcaaacataaacctggaaatatctgcacccctcacagttacctcagaagccctaactgtggctgccgccgcacctctaatggtcgcgggcaacacactcaccatgcaatcacaggccccgctaaccgtgcacgactccaaacttagcattgccacccaaggacccctcacagtgtcagaaggaaagctagccctgcaaacatcaggccccctcaccaccaccgatagcagtacccttactatcactgcctcaccccctctaactactgccactggtagcttgggcattgacttgaaagagcccatttatacacaaaatggaaaactaggactaaagtacggggctcctttgcatgtaacagacgacctaaacactttgaccgtagcaactggtccaggtgtgactattaataatacttccttgcaaactaaagttactggagccttgggttttgattcacaaggcaatatgcaacttaatgtagcaggaggactaaggattgattctcaaaacagacgccttatacttgatgttagttatccgtttgatgctcaaaaccaactaaatctaagactaggacagggccctctttttataaactcagcccacaacttggatattaactacaacaaaggcctttacttgtttacagcttcaaacaattccaaaaagcttgaggttaacctaagcactgccaaggggttgatgtttgacgctacagccatagccattaatgcaggagatgggcttgaatttggttcacctaatgcaccaaacacaaatcccctcaaaacaaaaattggccatggcctagaatttgattcaaacaaggctatggttcctaaactaggaactggccttagttttgacagcacaggtgccattacagtaggaaacaaaaataatgataagctaactttgtggaccacaccagctccatctcctaactgtagactaaatgcagagaaagatgctaaactcactttggtcttaacaaaatgtggcagtcaaatacttgctacagtttcagttttggctgttaaaggcagtttggctccaatatctggaacagttcaaagtgctcatcttattataagatttgacgaaaatggagtgctactaaacaattccttcctggacccagaatattggaactttagaaatggagatcttactgaaggcacagcctatacaaacgctgttggatttatgcctaacctatcagcttatccaaaatctcacggtaaaactgccaaaagtaacattgtcagtcaagtttacttaaacggagacaaaactaaacctgtaacactaaccattacactaaacggtacacaggaaacaggagacacaactccaagtgcatactctatgtcattttcatgggactggtctggccacaactacattaatgaaatatttgccacatcctcttacactttttcatacattgcccaagaataaagaatcgtttgtgttatgtttcaacgtgtttatttttcaattgcagaaaatttcgaatcatttttcattcagtagtatagccccaccaccacatagcttatacagatcaccgtaccttaatcaaactcacagaaccctagtattcaacctgccacctccctcccaacacacagagtacacagtcctttctccccggctggccttaaaaagcatcatatcatgggtaacagacatattcttaggtgttatattccacacggtttcctgtcgagccaaacgctcatcagtgatattaataaactccccgggcagctcacttaagttcatgtcgctgtccagctgctgagccacaggctgctgtccaacttgcggttgcttaacgggcggcgaaggagaagtccacgcctacatgggggtagagtcataatcgtgcatcaggatagggcggtggtgctgcagcagcgcgcgaataaactgctgccgccgccgctccgtcctgcaggaatacaacatggcagtggtctcctcagcgatgattcgcaccgcccgcagcataaggcgccttgtcctccgggcacagcagcgcaccctgatctcacttaaatcagcacagtaactgcagcacagcaccacaatattgttcaaaatcccacagtgcaaggcgctgtatccaaagctcatggcggggaccacagaacccacgtggccatcataccacaagcgcaggtagattaagtggcgacccctcataaacacgctggacataaacattacctcttttggcatgttgtaattcaccacctcccggtaccatataaacctctgattaaacatggcgccatccaccaccatcctaaaccagctggccaaaacctgcccgccggctatacactgcagggaaccgggactggaacaatgacagtggagagcccaggactcgtaaccatggatcatcatgctcgtcatgatatcaatgttggcacaacacaggcacacgtgcatacacttcctcaggattacaagctcctcccgcgttagaaccatatcccagggaacaacccattcctgaatcagcgtaaatcccacactgcagggaagacctcgcacgtaactcacgttgtgcattgtcaaagtgttacattcgggcagcagcggatgatcctccagtatggtagcgcgggtttctgtctcaaaaggaggtagacgatccctactgtacggagtgcgccgagacaaccgagatcgtgttggtcgtagtgtcatgccaaatggaacgccggacgtagtcatatttcctgaagcaaaaccaggtgcgggcgtgacaaacagatctgcgtctccggtctcgccgcttagatcgctctgtgtagtagttgtagtatatccactctctcaaagcatccaggcgccccctggcttcgggttctatgtaaactccttcatgcgccgctgccctgataacatccaccaccgcagaataagccacacccagccaacctacacattcgttctgcgagtcacacacgggaggagcgggaagagctggaagaaccatgtttttttttttattccaaaagattatccaaaacctcaaaatgaagatctattaagtgaacgcgctcccctccggtggcgtggtcaaactctacagccaaagaacagataatggcatttgtaagatgttgcacaatggcttccaaaaggcaaacggccctcacgtccaagtggacgtaaaggctaaacccttcagggtgaatctcctctataaacattccagcaccttcaaccatgcccaaataattctcatctcgccaccttctcaatatatctctaagcaaatcccgaatattaagtccggccattgtaaaaatctgctccagagcgccctccaccttcagcctcaagcagcgaatcatgattgcaaaaattcaggttcctcacagacctgtataagattcaaaagcggaacattaacaaaaataccgcgatcccgtaggtcccttcgcagggccagctgaacataatcgtgcaggtctgcacggaccagcgcggccacttccccgccaggaaccttgacaaaagaacccacactgattatgacacgcatactcggagctatgctaaccagcgtagccccgatgtaagctttgttgcatgggcggcgatataaaatgcaaggtgctgctcaaaaaatcaggcaaagcctcgcgcaaaaaagaaagcacatcgtagtcatgctcatgcagataaaggcaggtaagctccggaaccaccacagaaaaagacaccatttttctctcaaacatgtctgcgggtttctgcataaacacaaaataaaataacaaaaaaacatttaaacattagaagcctgtcttacaacaggaaaaacaacccttataagcataagacggactacggccatgccggcgtgaccgtaaaaaaactggtcaccgtgattaaaaagcaccaccgacagctcctcggtcatgtccggagtcataatgtaagactcggtaaacacatcaggttgattcacatcggtcagtgctaaaaagcgaccgaaatagcccgggggaatacatacccgcaggcgtagagacaacattacagcccccataggaggtataacaaaattaataggagagaaaaacacataaacacctgaaaaaccctcctgcctaggcaaaatagcaccctcccgctccagaacaacatacagcgcttccacagcggcagccataacagtcagccttaccagtaaaaaagaaaacctattaaaaaaacaccactcgacacggcaccagctcaatcagtcacagtgtaaaaaagggccaagtgcagagcgagtatatataggactaaaaaatgacgtaacggttaaagtccacaaaaaacacccagaaaaccgcacgcgaacctacgcccagaaacgaaagccaaaaaacccacaacttcctcaaatcgtcacttccgttttcccacgttacgtcacttcccattttaagaaaactacaattcccaacacatacaagttactccgccctaaaacctacgtcacccgccccgttcccacgccccgcgccacgtcacaaactccaccccctcattatcatattggcttcaatccaaaataaggtatattattgatgatgttaattaatttaaatccgcatgcgatatcgagctctcccgggaattcggatctgcgacgcgaggctggatggccttccccattatgattcttctcgcttccggcggcatcgggatgcccgcgttgcaggccatgctgtccaggcaggtagatgacgaccatcagggacagcttcacggccagcaaaaggccaggaaccgtaaaaaggccgcgttgctggcgtttttccataggctccgcccccctgacgagcatcacaaaaatcgacgctcaagtcagaggtggcgaaacccgacaggactataaagataccaggcgtttccccctggaagctccctcgtgcgctctcctgttccgaccctgccgcttaccggatacctgtccgcctttctcccttcgggaagcgtggcgctttctcaatgctcacgctgtaggtatctcagttcggtgtaggtcgttcgctccaagctgggctgtgtgcacgaaccccccgttcagcccgaccgctgcgccttatccggtaactatcgtcttgagtccaacccggtaagacacgacttatcgccactggcagcagccactggtaacaggattagcagagcgaggtatgtaggcggtgctacagagttcttgaagtggtggcctaactacggctacactagaaggacagtatttggtatctgcgctctgctgaagccagttaccttcggaaaaagagttggtagctcttgatccggcaaacaaaccaccgctggtagcggtggtttttttgtttgcaagcagcagattacgcgcagaaaaaaaggatctcaagaagatcctttgatcttttctacggggtctgacgctcagtggaacgaaaactcacgttaagggattttggtcatgagattatcaaaaaggatcttcacctagatccttttaaatcaatctaaagtatatatgagtaaacttggtctgacagttaccaatgcttaatcagtgaggcacctatctcagcgatctgtctatttcgttcatccatagttgcctgactccccgtcgtgtagataactacgatacgggagggcttaccatctggccccagtgctgcaatgataccgcgagacccacgctcaccggctccagatttatcagcaataaaccagccagccggaagggccgagcgcagaagtggtcctgcaactttatccgcctccatccagtctattaattgttgccgggaagctagagtaagtagttcgccagttaatagtttgcgcaacgttgttgccattgctgcaggcatcgtggtgtcacgctcgtcgtttggtatggcttcattcagctccggttcccaacgatcaaggcgagttacatgatcccccatgttgtgcaaaaaagcggttagctccttcggtcctccgatcgttgtcagaagtaagttggccgcagtgttatcactcatggttatggcagcactgcataattctcttactgtcatgccatccgtaagatgcttttctgtgactggtgagtactcaaccaagtcattctgagaatagtgtatgcggcgaccgagttgctcttgcccggcgtcaacacgggataataccgcgccacatagcagaactttaaaagtgctcatcattggaaaacgttcttcggggcgaaaactctcaaggatcttaccgctgttgagatccagttcgatgtaacccactcgtgcacccaactgatcttcagcatcttttactttcaccagcgtttctgggtgagcaaaaacaggaaggcaaaatgccgcaaaaaagggaataagggcgacacggaaatgttgaatactcatactcttcctttttcaatattattgaagcatttatcagggttattgtctcatgagcggatacatatttgaatgtatttagaaaaataaacaaataggggttccgcgcacatttccccgaaaagtgccacctgacgtctaagaaaccattattatcatgacattaacctataaaaataggcgtatcacgaggccctttcgtcttcaaggatccgaattcccgggagagctcgatatcgcatgcggatttaaattaattaa

SEQ ID NO: 34 - DNA, 21414 bp, Artificial Sequence
  Vector with soluble s4-1BBL ectodomain construct
accaaacaaagttgggtaaggatagttcaatcaatgatcatcttctagtgcacttaggattcaagatcctattatcagggacaagagcaggattagggatatctcgaggcgcgtgccaccatgcccatggggtctctgcaaccgctggccaccttgtacctgctggggatgctggtcgcttcctgcctcggacttgatcttcgacaagggatgtttgcacagctcgtagcacaaaacgttctgctcatcgacggccccttgtcctggtactcagacccaggattggccggtgtcagtcttaccggcggactcagctacaaggaggacactaaagagttggtcgtggcaaaggcaggcgtgtattatgtgttcttccaactggaactgaggagggttgtggccggtgaaggcagcggttccgtcagtttggcgctgcacctgcagcctttgaggagtgccgcaggtgctgctgcattggctctgactgtcgacctgccacctgcctcatccgaggctagaaattctgcctttggatttcaaggcagactgttgcatctgtcagcagggcagagacttggggtgcacctccatactgaggcaagagctagacacgcttggcagctcacccaaggggccactgttcttggactcttccgggtgacaccagagatacccgcaggactcccaagtccaaggagtgaaggcggtggcggaagcggtggaggtggatctggcggaggtggaagtcttgacctgcggcagggcatgttcgctcaattggtggcccagaatgttcttctgatcgatggtcctctgtcttggtattctgatcctggcttggcaggggtgtcacttactggtggtctttcatataaagaagacacaaaggagctcgtggtggctaaagctggagtttattacgtgttttttcaattggaactccggagagtggttgccggcgaaggttccggttctgtttctcttgctctgcacttgcaaccactgagaagtgctgcaggcgcagctgctttggctttgaccgtggatttgcctcctgcttcttccgaagccagaaacagcgcttttggctttcaaggaaggctcctgcatctctctgccggccaacgactgggagtgcatttgcacactgaagcacgcgcaagacatgcatggcagcttactcaaggagctacggtgctcggattgtttcgggtcacccctgagatacctgctgggctgcctagtcctagatcagaaggaggtggtggctctggtggaggaggttctggagggggaggaagcctggatctgcgacaaggcatgtttgcccagctcgttgcacaaaatgtgctgctgatcgacggacctctctcctggtattccgatcccgggttggctggagttagtctcacgggaggactgtcctacaaagaagatacgaaggaactcgtggtcgcaaaagctggggtttactacgtttttttccaacttgagctgcggagagttgtcgccggagaagggagcggatctgtatcattggcacttcaccttcagccgctcagatctgctgcaggtgccgctgcacttgctttgactgtggatctgcctccagcctcttctgaagcccgcaactctgcgtttggattccaagggagactgctccacctcagtgctggccaaagacttggagtccatctgcacacagaagcgagagccagacatgcctggcagctcactcagggggctactgtcctcggactgtttagagtcactccagaaataccagccggcctgccttcacctcgaagcgaataaacgcgccatccatcattgttataaaaaacttaggattcaagatcctattatcagggacaagagcaggattagggatatccgagatggccacacttttaaggagcttagcattgttcaaaagaaacaaggacaaaccacccattacatcaggatccggtggagccatcagaggaatcaaacacattattatagtaccaatccctggagattcctcaattaccactcgatccagacttctggaccggttggtgaggttaattggaaacccggatgtgagcgggcccaaactaacaggggcactaataggtatattatccttatttgtggagtctccaggtcaattgattcagaggatcaccgatgaccctgacgttagcataaggctgttagaggttgtccagagtgaccagtcacaatctggccttaccttcgcatcaagaggtaccaacatggaggatgaggcggaccaatacttttcacatgatgatccaattagtagtgatcaatccaggttcggatggttcgggaacaaggaaatctcagatattgaagtgcaagaccctgagggattcaacatgattctgggtaccatcctagcccaaatttgggtcttgctcgcaaaggcggttacggccccagacacggcagctgattcggagctaagaaggtggataaagtacacccaacaaagaagggtagttggtgaatttagattggagagaaaatggttggatgtggtgaggaacaggattgccgaggacctctccttacgccgattcatggtcgctctaatcctggatatcaagagaacacccggaaacaaacccaggattgctgaaatgatatgtgacattgatacatatatcgtagaggcaggattagccagttttatcctgactattaagtttgggatagaaactatgtatcctgctcttggactgcatgaatttgctggtgagttatccacacttgagtccttgatgaacctttaccagcaaatgggggaaactgcaccctacatggtaatcctggagaactcaattcagaacaagttcagtgcaggatcataccctctgctctggagctatgccatgggagtaggagtggaacttgaaaactccatgggaggtttgaactttggccgatcttactttgatccagcatattttagattagggcaagagatggtaaggaggtcagctggaaaggtcagttccacattggcatctgaactcggtatcactgccgaggatgcaaggcttgtttcagagattgcaatgcatactactgaggacaagatcagtagagcggttggacccagacaagcccaagtatcatttctacacggtgatcaaagtgagaatgagctaccgagattggggggcaaggaagataggagggtcaaacagagtcgaggagaagccagggagagctacagagaaaccgggcccagcagagcaagtgatgcgagagctgcccatcttccaaccggcacacccctagacattgacactgcaacggagtccagccaagatccgcaggacagtcgaaggtcagctgacgccctgcttaggctgcaagccatggcaggaatctcggaagaacaaggctcagacacggacacccctatagtgtacaatgacagaaatcttctagactaggtgcgagaggccgagggccagaacaacatccgcctaccatccatcattgttataaaaaacttaggaaccaggtccacacagccgccagcccatcaaccatccactcccacgattggagccaatggcagaagagcaggcacgccatgtcaaaaacggactggaatgcatccgggctctcaaggccgagcccatcggctcactggccatcgaggaagctatggcagcatggtcagaaatatcagacaacccaggacaggagcgagccacctgcagggaagagaaggcaggcagttcgggtctcagcaaaccatgcctctcagcaattggatcaactgaaggcggtgcacctcgcatccgcggtcagggacctggagagagcgatgacgacgctgaaactttgggaatccccccaagaaatctccaggcatcaagcactgggttacagtgttattacgtttatgatcacagcggtgaagcggttaagggaatccaagatgctgactctatcatggttcaatcaggccttgatggtgatagcaccctctcaggaggagacaatgaatctgaaaacagcgatgtggatattggcgaacctgataccgagggatatgctatcactgaccggggatctgctcccatctctatggggttcagggcttctgatgttgaaactgcagaaggaggggagatccacgagctcctgagactccaatccagaggcaacaactttccgaagcttgggaaaactctcaatgttcctccgcccccggaccccggtagggccagcacttccgggacacccattaaaaagggcacagacgcgagattagcctcatttggaacggagatcgcgtctttattgacaggtggtgcaacccaatgtgctcgaaagtcaccctcggaaccatcagggccaggtgcacctgcggggaatgtccccgagtgtgtgagcaatgccgcactgatacaggagtggacacccgaatctggtaccacaatctccccgagatcccagaataatgaagaagggggagactattatgatgatgagctgttctctgatgtccaagatattaaaacagccttggccaaaatacacgaggataatcagaagataatctccaagctagaatcactgctgttattgaagggagaagttgagtcaattaagaagcagatcaacaggcaaaatatcagcatatccaccctggaaggacacctctcaagcatcatgatcgccattcctggacttgggaaggatcccaacgaccccactgcagatgtcgaaatcaatcccgacttgaaacccatcataggcagagattcaggccgagcactggccgaagttctcaagaaacccgttgccagccgacaactccaaggaatgacaaatggacggaccagttccagaggacagctgctgaaggaatttcagctaaagccgatcgggaaaaagatgagctcagccgtcgggtttgttcctgacaccggccctgcatcacgcagtgtaatccgctccattataaaatccagccggctagaggaggatcggaagcgttacctgatgactctccttgatgatatcaaaggagccaatgatcttgccaagttccaccagatgctgatgaagataataatgaagtagctacagctcaacttacctgccaaccccatgccagtcgacccaactagtacaacctaaatccattataaaaaacttaggagcaaagtgattgcctcccaaggtccacaatgacagagacctacgacttcgacaagtcggcatgggacatcaaagggtcgatcgctccgatacaacccaccacctacagtgatggcaggctggtgccccaggtcagagtcatagatcctggtctaggcgacaggaaggatgaatgctttatgtacatgtttctgctgggggttgttgaggacagcgattccctagggcctccaatcgggcgagcatttgggttcctgcccttaggtgttggcagatccacagcaaagcccgaaaaactcctcaaagaggccactgagcttgacatagttgttagacgtacagcagggctcaatgaaaaactggtgttctacaacaacaccccactaactctcctcacaccttggagaaaggtcctaacaacagggagtgtcttcaacgcaaaccaagtgtgcaatgcggttaatctgataccgctcgataccccgcagaggttccgtgttgtttatatgagcatcacccgtctttcggataacgggtattacaccgttcctagaagaatgctggaattcagatcggtcaatgcagtggccttcaacctgctggtgacccttaggattgacaaggcgataggccctgggaagatcatcgacaatacagagcaacttcctgaggcaacatttatggtccacatcgggaacttcaggagaaagaagagtgaagtctactctgccgattattgcaaaatgaaaatcgaaaagatgggcctggtttttgcacttggtgggatagggggcaccagtcttcacattagaagcacaggcaaaatgagcaagactctccatgcacaactcgggttcaagaagaccttatgttacccgctgatggatatcaatgaagaccttaatcgattactctggaggagcagatgcaagatagtaagaatccaggcagttttgcagccatcagttcctcaagaattccgcatttacgacgacgtgatcataaatgatgaccaaggactattcaaagttctgtagaccgtagtgcccagcaatgcccgaaaacgacccccctcacaatgacagccagaaggcccggacaaaaaagccccctccgaaagactccacggaccaagcgagaggccagccagcagccgacggcaagcgcgaacaccaggcggccccagcacagaacagccctgacacaaggccaccaccagccaccccaatctgcatcctcctcgtgggacccccgaggaccaacccccaaggctgcccccgatccaaaccaccaaccgcatccccaccacccccgggaaagaaacccccagcaattggaaggcccctccccctcttcctcaacacaagaactccacaaccgaaccgcacaagcgaccgaggtgacccaaccgcaggcatccgactccctagacagatcctctctccccggcaaactaaacaaaacttagggccaaggaacatacacacccaacagaacccagaccccggcccacggcgccgcgcccccaacccccgacaaccagagggagcccccaaccaatcccgccggctcccccggtgcccacaggcagggacaccaacccccgaacagacccagcacccaaccatcgacaatccaagacgggggggcccccccaaaaaaaggcccccaggggccgacagccagcaccgcgaggaagcccacccaccccacacacgaccacggcaaccaaaccagaacccagaccaccctgggccaccagctcccagactcggccatcaccccgcagaaaggaaaggccacaacccgcgcaccccagccccgatccggcggggagccacccaacccgaaccagcacccaagagcgatccccgaaggacccccgaaccgcaaaggacatcagtatcccacagcctctccaagtcccccggtctcctcctcttctcgaagggaccaaaagatcaatccaccacacccgacgacactcaactccccacccctaaaggagacaccgggaatcccagaatcaagactcatccaatgtccatcatgggtctcaaggtgaacgtctctgccatattcatggcagtactgttaactctccaaacacccaccggtcaaatccattggggcaatctctctaagataggggtggtaggaataggaagtgcaagctacaaagttatgactcgttccagccatcaatcattagtcataaaattaatgcccaatataactctcctcaataactgcacgagggtagagattgcagaatacaggagactactgagaacagttttggaaccaattagagatgcacttaatgcaatgacccagaatataagaccggttcagagtgtagcttcaagtaggagacacaagagatttgcgggagtagtcctggcaggtgcggccctaggcgttgccacagctgctcagataacagccggcattgcacttcaccagtccatgctgaactctcaagccatcgacaatctgagagcgagcctggaaactactaatcaggcaattgagacaatcagacaagcagggcaggagatgatattggctgttcagggtgtccaagactacatcaataatgagctgataccgtctatgaaccaactatcttgtgatttaatcggccagaagctcgggctcaaattgctcagatactatacagaaatcctgtcattatttggccccagtttacgggaccccatatctgcggagatatctatccaggctttgagctatgcgcttggaggagacatcaataaggtgttagaaaagctcggatacagtggaggtgatttactgggcatcttagagagcggaggcatcaaggcccggataactcacgtcgacacagagtcctacttcattgtcctcagtatagcctatccgacgctgtccgagattaagggggtgattgtccaccggctagagggggtctcgtacaacataggctctcaagagtggtataccactgtgcccaagtatgttgcaacccaagggtaccttatctcgaattttgatgagtcatcgtgtactttcatgccagaggggactgtgtgcagccaaaatgccttgtacccgatgagtcctctgctccaagaatgcctccgggggtacaccaagtcctgtgctcgtacactcgtatccgggtcttttgggaaccggttcattttatcacaagggaacctaatagccaattgtgcatcaatcctttgcaagtgttacacaacaggaacgatcattaatcaagaccctgacaagatcctaacatacattgctgccgatcactgcccggtagtcgaggtgaacggcgtgaccatccaagtcgggagcaggaggtatccagacgctgtgtacttgcacagaattgacctcggtcctcccatatcattggagaggttggacgtagggacaaatctggggaatgcaattgctaagttggaggatgccaaggaattgttggagtcatcggaccagatattgaggagtatgaaaggtttatcgagcactagcatagtctacatcctgattgcagtgtgtcttggagggttgatagggatccccgctttaatatgttgctgcagggggcgttgtaacaaaaagggagaacaagttggtatgtcaagaccaggcctaaagcctgatcttacgggaacatcaaaatcctatgtaaggtcgctctgatcctctacaactcttgaaacacaaatgtcccacaagtctcctcttcgtcatcaagcaaccaccgcacccagcatcaagcccacctgaaattatctccggcttccctctggccgaacaatatcggtagttaatcaaaacttagggtgcaagatcatccacaatgtcaccacaacgagaccggataaatgccttctacaaagataacccccatcccaagggaagtaggatagtcattaacagagaacatcttatgattgatagaccttatgttttgctggctgttctgtttgtcatgtttctgagcttgatcgggttgctagccattgcaggcattagacttcatcgggcagccatctacaccgcagagatccataaaagcctcagcaccaatctagatgtaactaactcaatcgagcatcaggtcaaggacgtgctgacaccactcttcaaaatcatcggtgatgaagtgggcctgaggacacctcagagattcactgacctagtgaaattaatctctgacaagatcaagttccttaatccggatagggagtacgacttcagagatctcacttggtgtatcaacccgccagagagaatcaaattggattatgatcaatactgtgcagatgtggctgctgaagagctcatgaatgcattggtgaactcaactctactggagaccagaacaaccaatcagttcctagctgtctcaaagggaaactgctcagggcccactacaatcagaggtcaattctcaaacatgtcgctgtccctgttagacttgtatttaggtcgaggttacaatgtgtcatctatagtcactatgacatcccagggaatgtatgggggaacttacctagtggaaaagcctaatctgagcagcaaaaggtcagagttgtcacaactgagcatgtaccgagtgtttgaagtaggtgttatcagaaatccgggtttgggggctccggtgttccatatgacaaactatcttgagcaaccagtcagtaatgatctcagcaactgtatggtggctttgggggagctcaaactcgcagccctttgtcacggggaagattctatcacaattccctatcagggatcagggaaaggtgtcagcttccagctcgtcaagctaggtgtctggaaatccccaaccgacatgcaatcctgggtccccttatcaacggatgatccagtgatagacaggctttacctctcatctcacagaggtgttatcgctgacaatcaagcaaaatgggctgtcccgacaacacgaacagatgacaagttgcgaatggagacatgcttccaacaggcgtgtaagggtaaaatccaagcactctgcgagaatcccgagtgggcaccattgaaggataacaggattccttcatacggggtcttgtctgttgatctgagtctgacagttgagcttaaaatcaaaattgcttcgggattcgggccattgatcacacacggttcagggatggacctatacaaatccaaccacaacaatgtgtattggctgactatcccgccaatgaagaacctagccttaggtgtaatcaacacattggagtggataccgagattcaaggttagtccctacctcttcactgtcccaattaaggaagcaggcgaagactgccatgccccaacatacctacctgcggaggtggatggtgatgtcaaactcagttccaatctggtgattctacctggtcaagatctccaatatgttttggcaacctacgatacttccagggttgaacatgctgtggtttattacgtttacagcccaagccgctcattttcttacttttatccttttaggttgcctataaagggggtccccatcgaattacaagtggaatgcttcacatgggaccaaaaactctggtgccgtcacttctgtgtgcttgcggactcagaatctggtggacatatcactcactctgggatggtgggcatgggagtcagctgcacagtcacccgggaagatggaaccaatcgcagatagggctgctagtgaaccaatcacatgatgtcacccagacatcaggcatacccactagtgtgaaatagacatcagaattaagaaaaacgtagggtccaagtggttccccgttatggactcgctatctgtcaaccagatcttataccctgaagttcacctagatagcccgatagttaccaataagatagtagccatcctggagtatgctcgagtccctcacgcttacagcctggaggaccctacactgtgtcagaacatcaagcaccgcctaaaaaacggattttccaaccaaatgattataaacaatgtggaagttgggaatgtcatcaagtccaagcttaggagttatccggcccactctcatattccatatccaaattgtaatcaggatttatttaacatagaagacaaagagtcaacgaggaagatccgtgaactcctcaaaaaggggaattcgctgtactccaaagtcagtgataaggttttccaatgcttaagggacactaactcacggcttggcctaggctccgaattgagggaggacatcaaggagaaagttattaacttgggagtttacatgcacagctcccagtggtttgagccctttctgttttggtttacagtcaagactgagatgaggtcagtgattaaatcacaaacccatacttgccataggaggagacacacacctgtattcttcactggtagttcagttgagttgctaatctctcgtgaccttgttgctataatcagtaaagagtctcaacatgtatattacctgacatttgaactggttttgatgtattgtgatgtcatagaggggaggttaatgacagagaccgctatgactattgatgctaggtatacagagcttctaggaagagtcagatacatgtggaaactgatagatggtttcttccctgcactcgggaatccaacttatcaaattgtagccatgctggagcctctttcacttgcttacctgcagctgagggatataacagtagaactcagaggtgctttccttaaccactgctttactgaaatacatgatgttcttgaccaaaacgggttttctgatgaaggtacttatcatgagttaactgaagctctagattacattttcataactgatgacatacatctgacaggggagattttctcatttttcagaagtttcggccaccccagacttgaagcagtaacggctgctgaaaatgttaggaaatacatgaatcagcctaaagtcattgtgtatgagactctgatgaaaggtcatgccatattttgtggaatcataatcaacggctatcgtgacaggcacggaggcagttggccaccgctgaccctccccctgcatgctgcagacacaatccggaatgctcaagcttcaggtgaagggttaacacatgagcagtgcgttgataactggaaatcttttgctggagtgaaatttggctgctttatgcctcttagcctggatagtgatctgacaatgtacctaaaggacaaggcacttgctgctctccaaagggaatgggattcagtttacccgaaagagttcctgcgttacgaccctcccaagggaaccgggtcacggaggcttgtagatgttttccttaatgattcgagctttgacccatatgatgtgataatgtatgttgtaagtggagcttacctccatgaccctgagttcaacctgtcttacagcctgaaagaaaaggagatcaaggaaacaggtagactttttgctaaaatgacttacaaaatgagggcatgccaagtgattgctgaaaatctaatctcaaacgggattggcaaatattttaaggacaatgggatggccaaggatgagcacgatttgactaaggcactccacactctagctgtctcaggagtccccaaagatctcaaagaaagtcacaggggggggccagtcttaaaaacctactcccgaagcccagtccacacaagtaccaggaacgtgagagcagcaaaagggtttatagggttccctcaagtaattcggcaggaccaagacactgatcatccggagaatatggaagcttacgagacagtcagtgcatttatcacgactgatctcaagaagtactgccttaattggagatatgagaccatcagcttgtttgcacagaggctaaatgagatttacggattgccctcatttttccagtggctgcataagaggcttgagacctctgtcctgtatgtaagtgaccctcattgcccccccgaccttgacgcccatatcccgttatataaagtccccaatgatcaaatcttcattaagtaccctatgggaggtatagaagggtattgtcagaagctgtggaccatcagcaccattccctatctatacctggctgcttatgagagcggagtaaggattgcttcgttagtgcaaggggacaatcagaccatagccgtaacaaaaagggtacccagcacatggccctacaaccttaagaaacgggaagctgctagagtaactagagattactttgtaattcttaggcaaaggctacatgatattggccatcacctcaaggcaaatgagacaattgtttcatcacatttttttgtctattcaaaaggaatatattatgatgggctacttgtgtcccaatcactcaagagcatcgcaagatgtgtattctggtcagagactatagttgatgaaacaagggcagcatgcagtaatattgctacaacaatggctaaaagcatcgagagaggttatgaccgttaccttgcatattccctgaacgtcctaaaagtgatacagcaaattctgatctctcttggcttcacaatcaattcaaccatgacccgggatgtagtcatacccctcctcacaaacaacgacctcttaataaggatggcactgttgcccgctcctattggggggatgaattatctgaatatgagcaggctgtttgtcagaaacatcggtgatccagtaacatcatcaattgctgatctcaagagaatgattctcgcctcactaatgcctgaagagaccctccatcaagtaatgacacaacaaccgggggactcttcattcctagactgggctagcgacccttactcagcaaatcttgtatgtgtccagagcatcactagactcctcaagaacataactgcaaggtttgtcctgatccatagtccaaacccaatgttaaaaggattattccatgatgacagtaaagaagaggacgagggactggcggcattcctcatggacaggcatattatagtacctagggcagctcatgaaatcctggatcatagtgtcacaggggcaagagagtctattgcaggcatgctggataccacaaaaggcttgattcgagccagcatgaggaagggggggttaacctctcgagtgataaccagattgtccaattatgactatgaacaattcagagcagggatggtgctattgacaggaagaaagagaaatgtcctcattgacaaagagtcatgttcagtgcagctggcgagagctctaagaagccatatgtgggcgaggctagctcgaggacggcctatttacggccttgaggtccctgatgtactagaatctatgcgaggccaccttattcggcgtcatgagacatgtgtcatctgcgagtgtggatcagtcaactacggatggttttttgtcccctcgggttgccaactggatgatattgacaaggaaacatcatccttgagagtcccatatattggttctaccactgatgagagaacagacatgaagcttgccttcgtaagagccccaagtcgatccttgcgatctgctgttagaatagcaacagtgtactcatgggcttacggtgatgatgatagctcttggaacgaagcctggttgttggctaggcaaagggccaatgtgagcctggaggagctaagggtgatcactcccatctcaacttcgactaatttagcgcataggttgagggatcgtagcactcaagtgaaatactcaggtacatcccttgtccgagtggcgaggtataccacaatctccaacgacaatctctcatttgtcatatcagataagaaggttgatactaactttatataccaacaaggaatgcttctagggttgggtgttttagaaacattgtttcgactcgagaaagataccggatcatctaacacggtattacatcttcacgtcgaaacagattgttgcgtgatcccgatgatagatcatcccaggatacccagctcccgcaagctagagctgagggcagagctatgtaccaacccattgatatatgataatgcacctttaattgacagagatgcaacaaggctatacacccagagccataggaggcaccttgtggaatttgttacatggtccacaccccaactatatcacattttagctaagtccacagcactatctatgattgacctggtaacaaaatttgagaaggaccatatgaatgaaatttcagctctcataggggatgacgatatcaatagtttcataactgagtttctgctcatagagccaagattattcactatctacttgggccagtgtgcggccatcaattgggcatttgatgtacattatcatagaccatcagggaaatatcagatgggtgagctgttgtcatcgttcctttctagaatgagcaaaggagtgtttaaggtgcttgtcaatgctctaagccacccaaagatctacaagaaattctggcattgtggtattatagagcctatccatggtccttcacttgatgctcaaaacttgcacacaactgtgtgcaacatggtttacacatgctatatgacctacctcgacctgttgttgaatgaagagttagaagagttcacatttctcttgtgtgaaagcgacgaggatgtagtaccggacagattcgacaacatccaggcaaaacacttatgtgttctggcagatttgtactgtcaaccagggacctgcccaccaattcgaggtctaagaccggtagagaaatgtgcagttctaaccgaccatatcaaggcagaggctatgttatctccagcaggatcttcgtggaacataaatccaattattgtagaccattactcatgctctctgacttatctccggcgaggatcgatcaaacagataagattgagagttgatccaggattcattttcgacgccctcgctgaggtaaatgtcagtcagccaaagatcggcagcaacaacatctcaaatatgagcatcaaggctttcagacccccacacgatgatgttgcaaaattgctcaaagatatcaacacaagcaagcacaatcttcccatttcagggggcaatctcgccaattatgaaatccatgctttccgcagaatcgggttgaactcatctgcttgctacaaagctgttgagatatcaacattaattaggagatgccttgagccaggggaggacggcttgttcttgggtgagggatcgggttctatgttgatcacttataaagagatacttaaactaaacaagtgcttctataatagtggggtttccgccaattctagatctggtcaaagggaattagcaccctatccctccgaagttggccttgtcgaacacagaatgggagtaggtaatattgtcaaagtgctctttaacgggaggcccgaagtcacgtgggtaggcagtgtagattgcttcaatttcatagttagtaatatccctacctctagtgtggggtttatccattcagatatagagaccttgcctgacaaagatactatagagaagctagaggaattggcagccatcttatcgatggctctgctcctgggcaaaataggatcaatactggtgattaagcttatgcctttcagcggggattttgttcagggatttataagttatgtagggtctcattatagagaagtgaaccttgtataccctagatacagcaacttcatctctactgaatcttatttggttatgacagatctcaaggctaaccggctaatgaatcctgaaaagattaagcagcagataattgaatcatctgtgaggacttcacctggacttataggtcacatcctatccattaagcaactaagctgcatacaagcaattgtgggagacgcagttagtagaggtgatatcaatcctactctgaaaaaacttacacctatagagcaggtgctgatcaattgcgggttggcaattaacggacctaagctgtgcaaagaattgatccaccatgatgttgcctcagggcaagatggattgcttaattctatactcatcctctacagggagttggcaagattcaaagacaaccaaagaagtcaacaagggatgttccacgcttaccccgtattggtaagtagcaggcaacgagaacttatatctaggatcacccgcaaattctgggggcacattcttctttactccgggaacaaaaagttgataaataagtttatccagaatctcaagtccggctatctgatactagacttacaccagaatatcttcgttaagaatctatccaagtcagagaaacagattattatgacggggggtttgaaacgtgagtgggtttttaaggtaacagtcaaggagaccaaagaatggtataagttagtcggatacagtgccctgattaaggactaattggttgaactccggaaccctaatcctgccctaggtggttaggcattatttgcaatatattaaagaaaactttgaaaatacgaagtttctattcccagctttgtctggtggccggcatggtcccagcctcctcgctggcgccggctgggcaacattccgaggggaccgtcccctcggtaatggcgaatgggacgcggccggtcgatcgacgatccggctgctaacaaagcccgaaaggaagctgagttggctgctgccaccgctgagcaataactagcataaccccttggggcctctaaacgggtcttgaggggttttttgctgaaaggaggaactatatccggatcgagatcaattctgtgagcgtatggcaaacgaaggaaaaatagttatagtagccgcactcgatgggacatttcaacgtaaaccgtttaataatattttgaatcttattccattatctgaaatggtggtaaaactaactgctgtgtgtatgaaatgctttaaggaggcttccttttctaaacgattgggtgaggaaaccgagatagaaataataggaggtaatgatatgtatcaatcggtgtgtagaaagtgttacatcgactcataatattatattttttatctaaaaaactaaaaataaacattgattaaattttaatataatacttaaaaatggatgttgtgtcgttagataaaccgtttatgtattttgaggaaattgataatgagttagattacgaaccagaaagtgcaaatgaggtcgcaaaaaaactgccgtatcaaggacagttaaaactattactaggagaattattttttcttagtaagttacagcgacacggtatattagatggtgccaccgtagtgtatataggatctgctcccggtacacatatacgttatttgagagatcatttctataatttaggagtgatcccgaaaggaagctgagttggctgctgccaccgctgagcaataactagcataaccccttggggcctctaaacgggtcttgaggggttttttgctgaaaggaggaacgcgcctgatgcggtattttctccttacgcatctgtgcggtatttcacaccgcatatatggtgcactctcagtacaatctgctctgatgccgcatagttaagccagccccgacacccgccaacacccgctgacgcgccctgacgggcttgtctgctcccggcatccgcttacagacaagctgtgaccgtctccgggagctgcatgtgtcagaggttttcaccgtcatcaccgaaacgcgcgagacgaaagggcctcgtgatacgcctatttttataggttaatgtcatgataataatggtttcttagacgtcaggtggcacttttcggggaaatgtgcgcggaacccctatttgtttatttttctaaatacattcaaatatgtatccgctcatgagacaataaccctgataaatgcttcaataatattgaaaaaggaagagtatgagtattcaacatttccgtgtcgcccttattcccttttttgcggcattttgccttcctgtttttgctcacccagaaacgctggtgaaagtaaaagatgctgaagatcagttgggtgcacgagtgggttacatcgaactggatctcaacagcggtaagatccttgagagttttcgccccgaagaacgttttccaatgatgagcacttttaaagttctgctatgtggcgcggtattatcccgtattgacgccgggcaagagcaactcggtcgccgcatacactattctcagaatgacttggttgagtactcaccagtcacagaaaagcatcttacggatggcatgacagtaagagaattatgcagtgctgccataaccatgagtgataacactgcggccaacttacttctgacaacgatcggaggaccgaaggagctaaccgcttttttgcacaacatgggggatcatgtaactcgccttgatcgttgggaaccggagctgaatgaagccataccaaacgacgagcgtgacaccacgatgcctgtagcaatggcaacaacgttgcgcaaactattaactggcgaactacttactctagcttcccggcaacaattaatagactggatggaggcggataaagttgcaggaccacttctgcgctcggcccttccggctggctggtttattgctgataaatctggagccggtgagcgtgggtctcgcggtatcattgcagcactggggccagatggtaagccctcccgtatcgtagttatctacacgacggggagtcaggcaactatggatgaacgaaatagacagatcgctgagataggtgcctcactgattaagcattggtaactgtcagaccaagtttactcatatatactttagattgatttaaaacttcatttttaatttaaaaggatctaggtgaagatcctttttgataatctcatgaccaaaatcccttaacgtgagttttcgttccactgagcgtcagaccccgtagaaaagatcaaaggatcttcttgagatcctttttttctgcgcgtaatctgctgcttgcaaacaaaaaaaccaccgctaccagcggtggtttgtttgccggatcaagagctaccaactctttttccgaaggtaactggcttcagcagagcgcagataccaaatactgtccttctagtgtagccgtagttaggccaccacttcaagaactctgtagcaccgcctacatacctcgctctgctaatcctgttaccagtggctgctgccagtggcgataagtcgtgtcttaccgggttggactcaagacgatagttaccggataaggcgcagcggtcgggctgaacggggggttcgtgcacacagcccagcttggagcgaacgacctacaccgaactgagatacctacagcgtgagcattgagaaagcgccacgcttcccgaagggagaaaggcggacaggtatccggtaagcggcagggtcggaacaggagagcgcacgagggagcttccagggggaaacgcctggtatctttatagtcctgtcgggtttcgccacctctgacttgagcgtcgatttttgtgatgctcgtcaggggggcggagcctatggaaaaacgccagcaacgcggcctttttacggttcctggccttttgctggccttttgctcacatgttctttcctgcgttatcccctgattctgtggataaccgtattaccgcctttgagtgagctgataccgctcgccgcagccgaacgaccgagcgcagcgagtcagtgagcgaggaagcggaagagcgcccaatacgcaaaccgcctctccccgcgcgttggccgattcattaatgcagctggcacgacaggtttcccgactggaaagcgggcagtgagcgcaacgcaattaatgtgagttagctcactcattaggcaccccaggctttacactttatgcttccggctcgtatgttgtgtggaattgtgagcggataacaatttcacacaggaaacagctatgaccatgattacgccaagcttacgcgtcctggcattatgcccagtacatgaccttatgggactttcctacttggcagtacatctacgtattagtcatcgctattaccatggtgatgcggttttggcagtacatcaatgggcgtggatagcggtttgactcacggggatttccaagtctccaccccattgacgtcaatgggagtttgttttggcaccaaaatcaacgggactttccaaaatgtcgtaacaactccgccccattgacgcaaatgggcggtaggcgtgtacggtgggaggtctatataagcagagctcgtttagtgaaccgtgg

SEQ ID NO: 35 - DNA, 11083 bp, Artificial Sequence
  Vector with soluble s4-1BBL ectodomain construct
gttgacattgattattgactagttattaatagtaatcaattacggggtcattagttcatagcccatatatggagttccgcgttacataacttacggtaaatggcccgcctggctgaccgcccaacgacccccgcccattgacgtcaataatgacgtatgttcccatagtaacgccaatagggactttccattgacgtcaatgggtggagtatttacggtaaactgcccacttggcagtacatcaagtgtatcatatgccaagtccgccccctattgacgtcaatgacggtaaatggcccgcctggcattatgcccagtacatgaccttacgggactttcctacttggcagtacatctacgtattagtcatcgctattaccatggtgatgcggttttggcagtacaccaatgggcgtggatagcggtttgactcacggggatttccaagtctccaccccattgacgtcaatgggagtttgttttggcaccaaaatcaacgggactttccaaaatgtcgtaataaccccgccccgttgacgcaaatgggcggtaggcgtgtacggtgggaggtctatataagcagagctcgtttagtgaaccgtcagatctctagaagctgggtaccagctgctagcaagcttgccaccatgcccatggggtctctgcaaccgctggccaccttgtacctgctggggatgctggtcgcttcctgcctcggaggctctggctccaactggagccacccccagttcgagaagggaggttctgggggccatcaccatcaccatcacggcggttcagggggaacgcgttctggtgctggaggatcaggtggttctagtggaagtgatggtgctagcgggtctggcgttcgactttgggctacaagacaggcaatgctgggccaggtccatgaggttcctgaggggtggctcattttcgtggccgagcaggaggagctgtatgttcgcgtgcaaaacggctttaggaaggtccagctggaagcgcggacacctttgcccaggggaaccgataacgagggatccttggacctgcggcagggcatgtttgcgcagctggtggcccaaaatgttctgctgatcgatgggcccctgagctggtacagtgacccaggcctggcaggcgtgtccctgacggggggcctgagctacaaagaggacacgaaggagctggtggtggccaaggctggagtctactatgtcttctttcaactagagctgcggcgcgtggtggccggcgagggctcaggctccgtttcacttgcgctgcacctgcagccactgcgctctgctgctggggccgccgccctggctttgaccgtggacctgccacccgcctcctccgaggctcggaactcggccttcggtttccagggccgcttgctgcacctgagtgccggccagcgcctgggcgtccatcttcacactgaggccagggcacgccatgcctggcagcttacccagggcgccacagtcttgggactcttccgggtgacccccgaaatcccagccggactcccttcaccgaggtcggaataagcggccgcagatccagacatgataagatacattgatgagtttggacaaaccacaactagaatgcagtgaaaaaaatgctttatttgtgaaatttgtgatgctattgctttatttgtaaccattataagctgcaataaacaagttaacaacaacaattgcattcattttatgtttcaggttcagggggaggtgtgggaggttttttaaagcaagtaaaacctctacaaatgtggtatggctgattatgatccggctgcctcgcgcgtttcggtgatgacggtgaaaacctctgacacatgcagctcccggagacggtcacagcttgtctgtaagcggatgccgggagcagacaagcccgtcaggcgtcagcgggtgttggcgggtgtcggggcgcagccatgaggtcgactctagaggatcgatgccccgccccggacgaactaaacctgactacgacatctctgccccttcttcgcggggcagtgcatgtaatcccttcagttggttggtacaacttgccaactgggccctgttccacatgtgacacggggggggaccaaacacaaaggggttctctgactgtagttgacatccttataaatggatgtgcacatttgccaacactgagtggctttcatcctggagcagactttgcagtctgtggactgcaacacaacattgcctttatgtgtaactcttggctgaagctcttacaccaatgctgggggacatgtacctcccaggggcccaggaagactacgggaggctacaccaacgtcaatcagaggggcctgtgtagctaccgataagcggaccctcaagagggcattagcaatagtgtttataaggcccccttgttaaccctaaacgggtagcatatgcttcccgggtagtagtatatactatccagactaaccctaattcaatagcatatgttacccaacgggaagcatatgctatcgaattagggttagtaaaagggtcctaaggaacagcgatatctcccaccccatgagctgtcacggttttatttacatggggtcaggattccacgagggtagtgaaccattttagtcacaagggcagtggctgaagatcaaggagcgggcagtgaactctcctgaatcttcgcctgcttcttcattctccttcgtttagctaatagaataactgctgagttgtgaacagtaaggtgtatgtgaggtgctcgaaaacaaggtttcaggtgacgcccccagaataaaatttggacggggggttcagtggtggcattgtgctatgacaccaatataaccctcacaaaccccttgggcaataaatactagtgtaggaatgaaacattctgaatatctttaacaatagaaatccatggggtggggacaagccgtaaagactggatgtccatctcacacgaatttatggctatgggcaacacataatcctagtgcaatatgatactggggttattaagatgtgtcccaggcagggaccaagacaggtgaaccatgttgttacactctatttgtaacaaggggaaagagagtggacgccgacagcagcggactccactggttgtctctaacacccccgaaaattaaacggggctccacgccaatggggcccataaacaaagacaagtggccactcttttttttgaaattgtggagtgggggcacgcgtcagcccccacacgccgccctgcggttttggactgtaaaataagggtgtaataacttggctgattgtaaccccgctaaccactgcggtcaaaccacttgcccacaaaaccactaatggcaccccggggaatacctgcataagtaggtgggcgggccaagataggggcgcgattgctgcgatctggaggacaaattacacacacttgcgcctgagcgccaagcacagggttgttggtcctcatattcacgaggtcgctgagagcacggtgggctaatgttgccatgggtagcatatactacccaaatatctggatagcatatgctatcctaatctatatctgggtagcataggctatcctaatctatatctgggtagcatatgctatcctaatctatatctgggtagtatatgctatcctaatttatatctgggtagcataggctatcctaatctatatctgggtagcatatgctatcctaatctatatctgggtagtatatgctatcctaatctgtatccgggtagcatatgctatcctaatagagattagggtagtatatgctatcctaatttatatctgggtagcatatactacccaaatatctggatagcatatgctatcctaatctatatctgggtagcatatgctatcctaatctatatctgggtagcataggctatcctaatctatatctgggtagcatatgctatcctaatctatatctgggtagtatatgctatcctaatttatatctgggtagcataggctatcctaatctatatctgggtagcatatgctatcctaatctatatctgggtagtatatgctatcctaatctgtatccgggtagcatatgctatcctcatgcatatacagtcagcatatgatacccagtagtagagtgggagtgctatcctttgcatatgccgccacctcccaagggggcgtgaattttcgctgcttgtccttttcctgctggttgctcccattcttaggtgaatttaaggaggccaggctaaagccgtcgcatgtctgattgctcaccaggtaaatgtcgctaatgttttccaacgcgagaaggtgttgagcgcggagctgagtgacgtgacaacatgggtatgcccaattgccccatgttgggaggacgaaaatggtgacaagacagatggccagaaatacaccaacagcacgcatgatgtctactggggatttattctttagtgcgggggaatacacggcttttaatacgattgagggcgtctcctaacaagttacatcactcctgcccttcctcaccctcatctccatcacctccttcatctccgtcatctccgtcatcaccctccgcggcagccccttccaccataggtggaaaccagggaggcaaatctactccatcgtcaaagctgcacacagtcaccctgatattgcaggtaggagcgggctttgtcataacaaggtccttaatcgcatccttcaaaacctcagcaaatatatgagtttgtaaaaagaccatgaaataacagacaatggactcccttagcgggccaggttgtgggccgggtccaggggccattccaaaggggagacgactcaatggtgtaagacgacattgtggaatagcaagggcagttcctcgccttaggttgtaaagggaggtcttactacctccatatacgaacacaccggcgacccaagttccttcgtcggtagtcctttctacgtgactcctagccaggagagctcttaaaccttctgcaatgttctcaaatttcgggttggaacctccttgaccacgatgctttccaaaccaccctccttttttgcgcctgcctccatcaccctgaccccggggtccagtgcttgggccttctcctgggtcatctgcggggccctgctctatcgctcccgggggcacgtcaggctcaccatctgggccaccttcttggtggtattcaaaataatcggcttcccctacagggtggaaaaatggccttctacctggagggggcctgcgcggtggagacccggatgatgatgactgactactgggactcctgggcctcttttctccacgtccacgacctctccccctggctctttcacgacttccccccctggctctttcacgtcctctaccccggcggcctccactacctcctcgaccccggcctccactacctcctcgaccccggcctccactgcctcctcgaccccggcctccacctcctgctcctgcccctcctgctcctgcccctcctcctgctcctgcccctcctgcccctcctgctcctgcccctcctgcccctcctgctcctgcccctcctgcccctcctgctcctgcccctcctgcccctcctcctgctcctgcccctcctgcccctcctcctgctcctgcccctcctgcccctcctgctcctgcccctcctgcccctcctgctcctgcccctcctgcccctcctgctcctgcccctcctgctcctgcccctcctgctcctgcccctcctgctcctgcccctcctgcccctcctgcccctcctcctgctcctgcccctcctgctcctgcccctcctgcccctcctgcccctcctgctcctgcccctcctcctgctcctgcccctcctgcccctcctgcccctcctcctgctcctgcccctcctgcccctcctcctgctcctgcccctcctcctgctcctgcccctcctgcccctcctgcccctcctcctgctcctgcccctcctgcccctcctcctgctcctgcccctcctcctgctcctgcccctcctgcccctcctgcccctcctcctgctcctgcccctcctcctgctcctgcccctcctgcccctcctgcccctcctgcccctcctcctgctcctgcccctcctcctgctcctgcccctcctgctcctgcccctcccgctcctgctcctgctcctgttccaccgtgggtccctttgcagccaatgcaacttggacgtttttggggtctccggacaccatctctatgtcttggccctgatcctgagccgcccggggctcctggtcttccgcctcctcgtcctcgtcctcttccccgtcctcgtccatggttatcaccccctcttctttgaggtccactgccgccggagccttctggtccagatgtgtctcccttctctcctaggccatttccaggtcctgtacctggcccctcgtcagacatgattcacactaaaagagatcaatagacatctttattagacgacgctcagtgaatacagggagtgcagactcctgccccctccaacagcccccccaccctcatccccttcatggtcgctgtcagacagatccaggtctgaaaattccccatcctccgaaccatcctcgtcctcatcaccaattactcgcagcccggaaaactcccgctgaacatcctcaagatttgcgtcctgagcctcaagccaggcctcaaattcctcgtccccctttttgctggacggtagggatggggattctcgggacccctcctcttcctcttcaaggtcaccagacagagatgctactggggcaacggaagaaaagctgggtgcggcctgtgaggatcagcttatcgatgataagctgtcaaacatgagaattcttgaagacgaaagggcctcgtgatacgcctatttttataggttaatgtcatgataataatggtttcttagacgtcaggtggcacttttcggggaaatgtgcgcggaacccctatttgtttatttttctaaatacattcaaatatgtatccgctcatgagacaataaccctgataaatgcttcaataatattgaaaaaggaagagtatgagtattcaacatttccgtgtcgcccttattcccttttttgcggcattttgccttcctgtttttgctcacccagaaacgctggtgaaagtaaaagatgctgaagatcagttgggtgcacgagtgggttacatcgaactggatctcaacagcggtaagatccttgagagttttcgccccgaagaacgttttccaatgatgagcacttttaaagttctgctatgtggcgcggtattatcccgtgttgacgccgggcaagagcaactcggtcgccgcatacactattctcagaatgacttggttgagtactcaccagtcacagaaaagcatcttacggatggcatgacagtaagagaattatgcagtgctgccataaccatgagtgataacactgcggccaacttacttctgacaacgatcggaggaccgaaggagctaaccgcttttttgcacaacatgggggatcatgtaactcgccttgatcgttgggaaccggagctgaatgaagccataccaaacgacgagcgtgacaccacgatgcctgcagcaatggcaacaacgttgcgcaaactattaactggcgaactacttactctagcttcccggcaacaattaatagactggatggaggcggataaagttgcaggaccacttctgcgctcggcccttccggctggctggtttattgctgataaatctggagccggtgagcgtgggtctcgcggtatcattgcagcactggggccagatggtaagccctcccgtatcgtagttatctacacgacggggagtcaggcaactatggatgaacgaaatagacagatcgctgagataggtgcctcactgattaagcattggtaactgtcagaccaagtttactcatatatactttagattgatttaaaacttcatttttaatttaaaaggatctaggtgaagatcctttttgataatctcatgaccaaaatcccttaacgtgagttttcgttccactgagcgtcagaccccgtagaaaagatcaaaggatcttcttgagatcctttttttctgcgcgtaatctgctgcttgcaaacaaaaaaaccaccgctaccagcggtggtttgtttgccggatcaagagctaccaactctttttccgaaggtaactggcttcagcagagcgcagataccaaatactgtccttctagtgtagccgtagttaggccaccacttcaagaactctgtagcaccgcctacatacctcgctctgctaatcctgttaccagtggctgctgccagtggcgataagtcgtgtcttaccgggttggactcaagacgatagttaccggataaggcgcagcggtcgggctgaacggggggttcgtgcacacagcccagcttggagcgaacgacctacaccgaactgagatacctacagcgtgagctatgagaaagcgccacgcttcccgaagggagaaaggcggacaggtatccggtaagcggcagggtcggaacaggagagcgcacgagggagcttccagggggaaacgcctggtatctttatagtcctgtcgggtttcgccacctctgacttgagcgtcgatttttgtgatgctcgtcaggggggcggagcctatggaaaaacgccagcaacgcggcctttttacggttcctggccttttgctggccttgaagctgtccctgatggtcgtcatctacctgcctggacagcatggcctgcaacgcgggcatcccgatgccgccggaagcgagaagaatcataatggggaaggccatccagcctcgcgtcgcgaacgccagcaagacgtagcccagcgcgtcggccccgagatgcgccgcgtgcggctgctggagatggcggacgcgatggatatgttctgccaagggttggtttgcgcattcacagttctccgcaagaattgattggctccaattcttggagtggtgaatccgttagcgaggtgccgccctgcttcatccccgtggcccgttgctcgcgtttgctggcggtgtccccggaagaaatatatttgcatgtctttagttctatgatgacacaaaccccgcccagcgtcttgtcattggcgaattcgaacacgcagatgcagtcggggcggcgcggtccgaggtccacttcgcatattaaggtgacgcgtgtggcctcgaacaccgagcgaccctgcagcgacccgcttaacagcgtcaacagcgtgccgcagatcccggggggcaatgagatatgaaaaagcctgaactcaccgcgacgtctgtcgagaagtttctgatcgaaaagttcgacagcgtctccgacctgatgcagctctcggagggcgaagaatctcgtgctttcagcttcgatgtaggagggcgtggatatgtcctgcgggtaaatagctgcgccgatggtttctacaaagatcgttatgtttatcggcactttgcatcggccgcgctcccgattccggaagtgcttgacattggggaattcagcgagagcctgacctattgcatctcccgccgtgcacagggtgtcacgttgcaagacctgcctgaaaccgaactgcccgctgttctgcagccggtcgcggaggccatggatgcgatcgctgcggccgatcttagccagacgagcgggttcggcccattcggaccgcaaggaatcggtcaatacactacatggcgtgatttcatatgcgcgattgctgatccccatgtgtatcactggcaaactgtgatggacgacaccgtcagtgcgtccgtcgcgcaggctctcgatgagctgatgctttgggccgaggactgccccgaagtccggcacctcgtgcacgcggatttcggctccaacaatgtcctgacggacaatggccgcataacagcggtcattgactggagcgaggcgatgttcggggattcccaatacgaggtcgccaacatcttcttctggaggccgtggttggcttgtatggagcagcagacgcgctacttcgagcggaggcatccggagcttgcaggatcgccgcggctccgggcgtatatgctccgcattggtcttgaccaactctatcagagcttggttgacggcaatttcgatgatgcagcttgggcgcagggtcgatgcgacgcaatcgtccgatccggagccgggactgtcgggcgtacacaaatcgcccgcagaagcgcggccgtctggaccgatggctgtgtagaagtactcgccgatagtggaaaccgacgccccagcactcgtccggatcgggagatgggggaggctaactgaaacacggaaggagacaataccggaaggaacccgcgctatgacggcaataaaaagacagaataaaacgcacgggtgttgggtcgtttgttcataaacgcggggttcggtcccagggctggcactctgtcgataccccaccgagaccccattggggccaatacgcccgcgtttcttccttttccccaccccaccccccaagttcgggtgaaggcccagggctcgcagccaacgtcggggcggcaggccctgccatagccactggccccgtgggttagggacggggtcccccatggggaatggtttatggttcgtgggggttattattttgggcgttgcgtggggtcaggtccacgactggactgagcagacagacccatggtttttggatggcctgggcatggaccgcatgtactggcgcgacacgaacaccgggcgtctgtggctgccaaacacccccgacccccaaaaaccaccgcgcggatttctggcgtgccaagctagtcgaccaattctcatgtttgacagcttatcatcgcagatccgggcaacgttgttgccattgctgcaggcgcagaactggtaggtatggaagatctatacattgaatcaatattggcaattagccatattagtcattggttatatagcataaatcaatattggctattggccattgcatacgttgtatctatatcataatatgtacatttatattggctcatgtccaatatgaccgccat

SEQ ID NO: 36 - DNA, 11959 bp, Artificial Sequence
  Vector with soluble s4-1BBL ectodomain construct
gttgacattgattattgactagttattaatagtaatcaattacggggtcattagttcatagcccatatatggagttccgcgttacataacttacggtaaatggcccgcctggctgaccgcccaacgacccccgcccattgacgtcaataatgacgtatgttcccatagtaacgccaatagggactttccattgacgtcaatgggtggagtatttacggtaaactgcccacttggcagtacatcaagtgtatcatatgccaagtccgccccctattgacgtcaatgacggtaaatggcccgcctggcattatgcccagtacatgaccttacgggactttcctacttggcagtacatctacgtattagtcatcgctattaccatggtgatgcggttttggcagtacaccaatgggcgtggatagcggtttgactcacggggatttccaagtctccaccccattgacgtcaatgggagtttgttttggcaccaaaatcaacgggactttccaaaatgtcgtaataaccccgccccgttgacgcaaatgggcggtaggcgtgtacggtgggaggtctatataagcagagctcgtttagtgaaccgtcagatctctagaagctgggtaccagctgctagcaagcttgccaccatgcccatgggatcattgcaacctctggctacactgtacctgctcggcatgttggtggccagttgcttgggcggcagcggatcaaattggagtcatccccagttcgagaagggcggcagtggaggacatcaccatcatcaccatggcgggagcggtggaggctctcttgatcttcgacaagggatgtttgcacagctcgtagcacaaaacgttctgctcatcgacggccccttgtcctggtactcagacccaggattggccggtgtcagtcttaccggcggactcagctacaaggaggacactaaagagttggtcgtggcaaaggcaggcgtgtattatgtgttcttccaactggaactgaggagggttgtggccggtgaaggcagcggttccgtcagtttggcgctgcacctgcagcctttgaggagtgccgcaggtgctgctgcattggctctgactgtcgacctgccacctgcctcatccgaggctagaaattctgcctttggatttcaaggcagactgttgcatctgtcagcagggcagagacttggggtgcacctccatactgaggcaagagctagacacgcttggcagctcacccaaggggccactgttcttggactcttccgggtgacaccagagatacccgcaggactcccaagtccaaggagtgaaggcggtggcggaagcggtggaggtggatctggcggaggtggaagtcttgacctgcggcagggcatgttcgctcaattggtggcccagaatgttcttctgatcgatggtcctctgtcttggtattctgatcctggcttggcaggggtgtcacttactggtggtctttcatataaagaagacacaaaggagctcgtggtggctaaagctggagtttattacgtgttttttcaattggaactccggagagtggttgccggcgaaggttccggttctgtttctcttgctctgcacttgcaaccactgagaagtgctgcaggcgcagctgctttggctttgaccgtggatttgcctcctgcttcttccgaagccagaaacagcgcttttggctttcaaggaaggctcctgcatctctctgccggccaacgactgggagtgcatttgcacactgaagcacgcgcaagacatgcatggcagcttactcaaggagctacggtgctcggattgtttcgggtcacccctgagatacctgctgggctgcctagtcctagatcagaaggaggtggtggctctggtggaggaggttctggagggggaggaagcctggatctgcgacaaggcatgtttgcccagctcgttgcacaaaatgtgctgctgatcgacggacctctctcctggtattccgatcccgggttggctggagttagtctcacgggaggactgtcctacaaagaagatacgaaggaactcgtggtcgcaaaagctggggtttactacgtttttttccaacttgagctgcggagagttgtcgccggagaagggagcggatctgtatcattggcacttcaccttcagccgctcagatctgctgcaggtgccgctgcacttgctttgactgtggatctgcctccagcctcttctgaagcccgcaactctgcgtttggattccaagggagactgctccacctcagtgctggccaaagacttggagtccatctgcacacagaagcgagagccagacatgcctggcagctcactcagggggctactgtcctcggactgtttagagtcactccagaaataccagccggcctgccttcacctcgaagcgaataagcggccgcagatccagacatgataagatacattgatgagtttggacaaaccacaactagaatgcagtgaaaaaaatgctttatttgtgaaatttgtgatgctattgctttatttgtaaccattataagctgcaataaacaagttaacaacaacaattgcattcattttatgtttcaggttcagggggaggtgtgggaggttttttaaagcaagtaaaacctctacaaatgtggtatggctgattatgatccggctgcctcgcgcgtttcggtgatgacggtgaaaacctctgacacatgcagctcccggagacggtcacagcttgtctgtaagcggatgccgggagcagacaagcccgtcaggcgtcagcgggtgttggcgggtgtcggggcgcagccatgaggtcgactctagaggatcgatgccccgccccggacgaactaaacctgactacgacatctctgccccttcttcgcggggcagtgcatgtaatcccttcagttggttggtacaacttgccaactgggccctgttccacatgtgacacggggggggaccaaacacaaaggggttctctgactgtagttgacatccttataaatggatgtgcacatttgccaacactgagtggctttcatcctggagcagactttgcagtctgtggactgcaacacaacattgcctttatgtgtaactcttggctgaagctcttacaccaatgctgggggacatgtacctcccaggggcccaggaagactacgggaggctacaccaacgtcaatcagaggggcctgtgtagctaccgataagcggaccctcaagagggcattagcaatagtgtttataaggcccccttgttaaccctaaacgggtagcatatgcttcccgggtagtagtatatactatccagactaaccctaattcaatagcatatgttacccaacgggaagcatatgctatcgaattagggttagtaaaagggtcctaaggaacagcgatatctcccaccccatgagctgtcacggttttatttacatggggtcaggattccacgagggtagtgaaccattttagtcacaagggcagtggctgaagatcaaggagcgggcagtgaactctcctgaatcttcgcctgcttcttcattctccttcgtttagctaatagaataactgctgagttgtgaacagtaaggtgtatgtgaggtgctcgaaaacaaggtttcaggtgacgcccccagaataaaatttggacggggggttcagtggtggcattgtgctatgacaccaatataaccctcacaaaccccttgggcaataaatactagtgtaggaatgaaacattctgaatatctttaacaatagaaatccatggggtggggacaagccgtaaagactggatgtccatctcacacgaatttatggctatgggcaacacataatcctagtgcaatatgatactggggttattaagatgtgtcccaggcagggaccaagacaggtgaaccatgttgttacactctatttgtaacaaggggaaagagagtggacgccgacagcagcggactccactggttgtctctaacacccccgaaaattaaacggggctccacgccaatggggcccataaacaaagacaagtggccactcttttttttgaaattgtggagtgggggcacgcgtcagcccccacacgccgccctgcggttttggactgtaaaataagggtgtaataacttggctgattgtaaccccgctaaccactgcggtcaaaccacttgcccacaaaaccactaatggcaccccggggaatacctgcataagtaggtgggcgggccaagataggggcgcgattgctgcgatctggaggacaaattacacacacttgcgcctgagcgccaagcacagggttgttggtcctcatattcacgaggtcgctgagagcacggtgggctaatgttgccatgggtagcatatactacccaaatatctggatagcatatgctatcctaatctatatctgggtagcataggctatcctaatctatatctgggtagcatatgctatcctaatctatatctgggtagtatatgctatcctaatttatatctgggtagcataggctatcctaatctatatctgggtagcatatgctatcctaatctatatctgggtagtatatgctatcctaatctgtatccgggtagcatatgctatcctaatagagattagggtagtatatgctatcctaatttatatctgggtagcatatactacccaaatatctggatagcatatgctatcctaatctatatctgggtagcatatgctatcctaatctatatctgggtagcataggctatcctaatctatatctgggtagcatatgctatcctaatctatatctgggtagtatatgctatcctaatttatatctgggtagcataggctatcctaatctatatctgggtagcatatgctatcctaatctatatctgggtagtatatgctatcctaatctgtatccgggtagcatatgctatcctcatgcatatacagtcagcatatgatacccagtagtagagtgggagtgctatcctttgcatatgccgccacctcccaagggggcgtgaattttcgctgcttgtccttttcctgctggttgctcccattcttaggtgaatttaaggaggccaggctaaagccgtcgcatgtctgattgctcaccaggtaaatgtcgctaatgttttccaacgcgagaaggtgttgagcgcggagctgagtgacgtgacaacatgggtatgcccaattgccccatgttgggaggacgaaaatggtgacaagacagatggccagaaatacaccaacagcacgcatgatgtctactggggatttattctttagtgcgggggaatacacggcttttaatacgattgagggcgtctcctaacaagttacatcactcctgcccttcctcaccctcatctccatcacctccttcatctccgtcatctccgtcatcaccctccgcggcagccccttccaccataggtggaaaccagggaggcaaatctactccatcgtcaaagctgcacacagtcaccctgatattgcaggtaggagcgggctttgtcataacaaggtccttaatcgcatccttcaaaacctcagcaaatatatgagtttgtaaaaagaccatgaaataacagacaatggactcccttagcgggccaggttgtgggccgggtccaggggccattccaaaggggagacgactcaatggtgtaagacgacattgtggaatagcaagggcagttcctcgccttaggttgtaaagggaggtcttactacctccatatacgaacacaccggcgacccaagttccttcgtcggtagtcctttctacgtgactcctagccaggagagctcttaaaccttctgcaatgttctcaaatttcgggttggaacctccttgaccacgatgctttccaaaccaccctccttttttgcgcctgcctccatcaccctgaccccggggtccagtgcttgggccttctcctgggtcatctgcggggccctgctctatcgctcccgggggcacgtcaggctcaccatctgggccaccttcttggtggtattcaaaataatcggcttcccctacagggtggaaaaatggccttctacctggagggggcctgcgcggtggagacccggatgatgatgactgactactgggactcctgggcctcttttctccacgtccacgacctctccccctggctctttcacgacttccccccctggctctttcacgtcctctaccccggcggcctccactacctcctcgaccccggcctccactacctcctcgaccccggcctccactgcctcctcgaccccggcctccacctcctgctcctgcccctcctgctcctgcccctcctcctgctcctgcccctcctgcccctcctgctcctgcccctcctgcccctcctgctcctgcccctcctgcccctcctgctcctgcccctcctgcccctcctcctgctcctgcccctcctgcccctcctcctgctcctgcccctcctgcccctcctgctcctgcccctcctgcccctcctgctcctgcccctcctgcccctcctgctcctgcccctcctgctcctgcccctcctgctcctgcccctcctgctcctgcccctcctgcccctcctgcccctcctcctgctcctgcccctcctgctcctgcccctcctgcccctcctgcccctcctgctcctgcccctcctcctgctcctgcccctcctgcccctcctgcccctcctcctgctcctgcccctcctgcccctcctcctgctcctgcccctcctcctgctcctgcccctcctgcccctcctgcccctcctcctgctcctgcccctcctgcccctcctcctgctcctgcccctcctcctgctcctgcccctcctgcccctcctgcccctcctcctgctcctgcccctcctcctgctcctgcccctcctgcccctcctgcccctcctgcccctcctcctgctcctgcccctcctcctgctcctgcccctcctgctcctgcccctcccgctcctgctcctgctcctgttccaccgtgggtccctttgcagccaatgcaacttggacgtttttggggtctccggacaccatctctatgtcttggccctgatcctgagccgcccggggctcctggtcttccgcctcctcgtcctcgtcctcttccccgtcctcgtccatggttatcaccccctcttctttgaggtccactgccgccggagccttctggtccagatgtgtctcccttctctcctaggccatttccaggtcctgtacctggcccctcgtcagacatgattcacactaaaagagatcaatagacatctttattagacgacgctcagtgaatacagggagtgcagactcctgccccctccaacagcccccccaccctcatccccttcatggtcgctgtcagacagatccaggtctgaaaattccccatcctccgaaccatcctcgtcctcatcaccaattactcgcagcccggaaaactcccgctgaacatcctcaagatttgcgtcctgagcctcaagccaggcctcaaattcctcgtccccctttttgctggacggtagggatggggattctcgggacccctcctcttcctcttcaaggtcaccagacagagatgctactggggcaacggaagaaaagctgggtgcggcctgtgaggatcagcttatcgatgataagctgtcaaacatgagaattcttgaagacgaaagggcctcgtgatacgcctatttttataggttaatgtcatgataataatggtttcttagacgtcaggtggcacttttcggggaaatgtgcgcggaacccctatttgtttatttttctaaatacattcaaatatgtatccgctcatgagacaataaccctgataaatgcttcaataatattgaaaaaggaagagtatgagtattcaacatttccgtgtcgcccttattcccttttttgcggcattttgccttcctgtttttgctcacccagaaacgctggtgaaagtaaaagatgctgaagatcagttgggtgcacgagtgggttacatcgaactggatctcaacagcggtaagatccttgagagttttcgccccgaagaacgttttccaatgatgagcacttttaaagttctgctatgtggcgcggtattatcccgtgttgacgccgggcaagagcaactcggtcgccgcatacactattctcagaatgacttggttgagtactcaccagtcacagaaaagcatcttacggatggcatgacagtaagagaattatgcagtgctgccataaccatgagtgataacactgcggccaacttacttctgacaacgatcggaggaccgaaggagctaaccgcttttttgcacaacatgggggatcatgtaactcgccttgatcgttgggaaccggagctgaatgaagccataccaaacgacgagcgtgacaccacgatgcctgcagcaatggcaacaacgttgcgcaaactattaactggcgaactacttactctagcttcccggcaacaattaatagactggatggaggcggataaagttgcaggaccacttctgcgctcggcccttccggctggctggtttattgctgataaatctggagccggtgagcgtgggtctcgcggtatcattgcagcactggggccagatggtaagccctcccgtatcgtagttatctacacgacggggagtcaggcaactatggatgaacgaaatagacagatcgctgagataggtgcctcactgattaagcattggtaactgtcagaccaagtttactcatatatactttagattgatttaaaacttcatttttaatttaaaaggatctaggtgaagatcctttttgataatctcatgaccaaaatcccttaacgtgagttttcgttccactgagcgtcagaccccgtagaaaagatcaaaggatcttcttgagatcctttttttctgcgcgtaatctgctgcttgcaaacaaaaaaaccaccgctaccagcggtggtttgtttgccggatcaagagctaccaactctttttccgaaggtaactggcttcagcagagcgcagataccaaatactgtccttctagtgtagccgtagttaggccaccacttcaagaactctgtagcaccgcctacatacctcgctctgctaatcctgttaccagtggctgctgccagtggcgataagtcgtgtcttaccgggttggactcaagacgatagttaccggataaggcgcagcggtcgggctgaacggggggttcgtgcacacagcccagcttggagcgaacgacctacaccgaactgagatacctacagcgtgagctatgagaaagcgccacgcttcccgaagggagaaaggcggacaggtatccggtaagcggcagggtcggaacaggagagcgcacgagggagcttccagggggaaacgcctggtatctttatagtcctgtcgggtttcgccacctctgacttgagcgtcgatttttgtgatgctcgtcaggggggcggagcctatggaaaaacgccagcaacgcggcctttttacggttcctggccttttgctggccttgaagctgtccctgatggtcgtcatctacctgcctggacagcatggcctgcaacgcgggcatcccgatgccgccggaagcgagaagaatcataatggggaaggccatccagcctcgcgtcgcgaacgccagcaagacgtagcccagcgcgtcggccccgagatgcgccgcgtgcggctgctggagatggcggacgcgatggatatgttctgccaagggttggtttgcgcattcacagttctccgcaagaattgattggctccaattcttggagtggtgaatccgttagcgaggtgccgccctgcttcatccccgtggcccgttgctcgcgtttgctggcggtgtccccggaagaaatatatttgcatgtctttagttctatgatgacacaaaccccgcccagcgtcttgtcattggcgaattcgaacacgcagatgcagtcggggcggcgcggtccgaggtccacttcgcatattaaggtgacgcgtgtggcctcgaacaccgagcgaccctgcagcgacccgcttaacagcgtcaacagcgtgccgcagatcccggggggcaatgagatatgaaaaagcctgaactcaccgcgacgtctgtcgagaagtttctgatcgaaaagttcgacagcgtctccgacctgatgcagctctcggagggcgaagaatctcgtgctttcagcttcgatgtaggagggcgtggatatgtcctgcgggtaaatagctgcgccgatggtttctacaaagatcgttatgtttatcggcactttgcatcggccgcgctcccgattccggaagtgcttgacattggggaattcagcgagagcctgacctattgcatctcccgccgtgcacagggtgtcacgttgcaagacctgcctgaaaccgaactgcccgctgttctgcagccggtcgcggaggccatggatgcgatcgctgcggccgatcttagccagacgagcgggttcggcccattcggaccgcaaggaatcggtcaatacactacatggcgtgatttcatatgcgcgattgctgatccccatgtgtatcactggcaaactgtgatggacgacaccgtcagtgcgtccgtcgcgcaggctctcgatgagctgatgctttgggccgaggactgccccgaagtccggcacctcgtgcacgcggatttcggctccaacaatgtcctgacggacaatggccgcataacagcggtcattgactggagcgaggcgatgttcggggattcccaatacgaggtcgccaacatcttcttctggaggccgtggttggcttgtatggagcagcagacgcgctacttcgagcggaggcatccggagcttgcaggatcgccgcggctccgggcgtatatgctccgcattggtcttgaccaactctatcagagcttggttgacggcaatttcgatgatgcagcttgggcgcagggtcgatgcgacgcaatcgtccgatccggagccgggactgtcgggcgtacacaaatcgcccgcagaagcgcggccgtctggaccgatggctgtgtagaagtactcgccgatagtggaaaccgacgccccagcactcgtccggatcgggagatgggggaggctaactgaaacacggaaggagacaataccggaaggaacccgcgctatgacggcaataaaaagacagaataaaacgcacgggtgttgggtcgtttgttcataaacgcggggttcggtcccagggctggcactctgtcgataccccaccgagaccccattggggccaatacgcccgcgtttcttccttttccccaccccaccccccaagttcgggtgaaggcccagggctcgcagccaacgtcggggcggcaggccctgccatagccactggccccgtgggttagggacggggtcccccatggggaatggtttatggttcgtgggggttattattttgggcgttgcgtggggtcaggtccacgactggactgagcagacagacccatggtttttggatggcctgggcatggaccgcatgtactggcgcgacacgaacaccgggcgtctgtggctgccaaacacccccgacccccaaaaaccaccgcgcggatttctggcgtgccaagctagtcgaccaattctcatgtttgacagcttatcatcgcagatccgggcaacgttgttgccattgctgcaggcgcagaactggtaggtatggaagatctatacattgaatcaatattggcaattagccatattagtcattggttatatagcataaatcaatattggctattggccattgcatacgttgtatctatatcataatatgtacatttatattggctcatgtccaatatgaccgccat

SEQ ID NO: 37 - DNA, 21414 bp, Artificial Sequence
  Vector with soluble s4-1BBL ectodomain construct
accaaacaaagttgggtaaggatagttcaatcaatgatcatcttctagtgcacttaggattcaagatcctattatcagggacaagagcaggattagggatatctcgaggcgcgtgccaccatgcccatggggtctctgcaaccgctggccaccttgtacctgctggggatgctggtcgcttcctgcctcggacttgatcttcgacaagggatgtttgcacagctcgtagcacaaaacgttctgctcatcgacggccccttgtcctggtactcagacccaggattggccggtgtcagtcttaccggcggactcagctacaaggaggacactaaagagttggtcgtggcaaaggcaggcgtgtattatgtgttcttccaactggaactgaggagggttgtggccggtgaaggcagcggttccgtcagtttggcgctgcacctgcagcctttgaggagtgccgcaggtgctgctgcattggctctgactgtcgacctgccacctgcctcatccgaggctagaaattctgcctttggatttcaaggcagactgttgcatctgtcagcagggcagagacttggggtgcacctccatactgaggcaagagctagacacgcttggcagctcacccaaggggccactgttcttggactcttccgggtgacaccagagatacccgcaggactcccaagtccaaggagtgaaggcggtggcggaagcggtggaggtggatctggcggaggtggaagtcttgacctgcggcagggcatgttcgctcaattggtggcccagaatgttcttctgatcgatggtcctctgtcttggtattctgatcctggcttggcaggggtgtcacttactggtggtctttcatataaagaagacacaaaggagctcgtggtggctaaagctggagtttattacgtgttttttcaattggaactccggagagtggttgccggcgaaggttccggttctgtttctcttgctctgcacttgcaaccactgagaagtgctgcaggcgcagctgctttggctttgaccgtggatttgcctcctgcttcttccgaagccagaaacagcgcttttggctttcaaggaaggctcctgcatctctctgccggccaacgactgggagtgcatttgcacactgaagcacgcgcaagacatgcatggcagcttactcaaggagctacggtgctcggattgtttcgggtcacccctgagatacctgctgggctgcctagtcctagatcagaaggaggtggtggctctggtggaggaggttctggagggggaggaagcctggatctgcgacaaggcatgtttgcccagctcgttgcacaaaatgtgctgctgatcgacggacctctctcctggtattccgatcccgggttggctggagttagtctcacgggaggactgtcctacaaagaagatacgaaggaactcgtggtcgcaaaagctggggtttactacgtttttttccaacttgagctgcggagagttgtcgccggagaagggagcggatctgtatcattggcacttcaccttcagccgctcagatctgctgcaggtgccgctgcacttgctttgactgtggatctgcctccagcctcttctgaagcccgcaactctgcgtttggattccaagggagactgctccacctcagtgctggccaaagacttggagtccatctgcacacagaagcgagagccagacatgcctggcagctcactcagggggctactgtcctcggactgtttagagtcactccagaaataccagccggcctgccttcacctcgaagcgaataaacgcgccatccatcattgttataaaaaacttaggattcaagatcctattatcagggacaagagcaggattagggatatccgagatggccacacttttaaggagcttagcattgttcaaaagaaacaaggacaaaccacccattacatcaggatccggtggagccatcagaggaatcaaacacattattatagtaccaatccctggagattcctcaattaccactcgatccagacttctggaccggttggtcaggttaattggaaacccggatgtgagcgggcccaaactaacaggggcactaataggtatattatccttatttgtggagtctccaggtcaattgattcagaggatcaccgatgaccctgacgttagcataaggctgttagaggttgtccagagtgaccagtcacaatctggccttaccttcgcatcaagaggtaccaacatggaggatgaggcggaccaatacttttcacatgatgatccaattagtagtgatcaatccaggttcggatggttcgagaacaaggaaatctcagatattgaagtgcaagaccctgagggattcaacatgattctgggtaccatcctagcccaaatttgggtcttgctcgcaaaggcggttacggccccagacacggcagctgattcggagctaagaaggtggataaagtacacccaacaaagaagggtggttggtgaatttagattggagagaaaatggttggatgtggtgaggaacaggattgccgaggacctctccttacgccgattcatggtcgctctaatcctggatatcaagagaacacccggaaacaaacccaggattgctgaaatgatatgtgacattgatacatatatcgtagaggcaggattagccagttttatcctgactattaagtttgggatagaaactatgtatcctgctcttggactgcatgaatttgctggtgagttatccacacttgagtccttgatgaacctttaccagcaaatgggggaaactgcaccctacatggtaatcctggagaactcaattcagaacaagttcagtgcaggatcataccctctgctctggagctatgccatgggagtaggagtggaacttgaaaactccatgggaggtttgaactttggccgatcttactttgatccagcatattttagattagggcaagagatggtaaggaggtcagctggaaaggtcagttccacattggcatctgaactcggtatcactgccgaggatgcaaggcttgtttcagagattgcaatgcatactactgaggacaagatcagtagagcggttggacccagacaagcccaagtatcatttctacacggtgatcaaagtgagaatgagctaccgagattggggggcaaggaagataggagggtcaaacagagtcgaggagaagccagggagagctacagagaaaccgggcccagcagagcaagtgatgcgagagctgcccatcttccaaccggcacacccctagacattgacactgcaacggagtccagccaagatccgcaggacagtcgaaggtcagctgacgccctgcttaggctgcaagccatggcaggaatctcggaagaacaaggctcagacacggacacccctatagtgtacaatgacagaaatcttctagactaggtgcgagaggccgagggccagaacaacatccgcctaccctccatcattgttataaaaaacttaggaaccaggtccacacagccgccagcccatcaaccatccactcccacgattggagccaatggcagaagagcaggcacgccatgtcaaaaacggactggaatgcatccgggctctcaaggccgagcccatcggctcactggccatcgaggaagctatggcagcatggtcagaaatatcagacaacccaggacaggagcgagccacctgcagggaagagaaggcaggcagttcgggtctcagcaaaccatgcctctcagcaattggatcaactgaaggcggtgcacctcgcatccgcggtcagggacctggagagagcgatgacgacgctgaaactttgggaatccccccaagaaatctccaggcatcaagcactgggttacagtgttattacgtttatgatcacagcggtgaagcggttaagggaatccaagatgctgactctatcatggttcaatcaggccttgatggtgatagcaccctctcaggaggagacaatgaatctgaaaacagcgatgtggatattggcgaacctgataccgagggatatgctatcactgaccggggatctgctcccatctctatggggttcagggcttctgatgttgaaactgcagaaggaggggagatccacgagctcctgagactccaatccagaggcaacaactttccgaagcttgggaaaactctcaatgttcctccgcccccggaccccggtagggccagcacttccgggacacccattaaaaagggcacagacgcgagattagcctcatttggaacggagatcgcgtctttattgacaggtggtgcaacccaatgtgctcgaaagtcaccctcggaaccatcagggccaggtgcacctgcggggaatgtccccgagtgtgtgagcaatgccgcactgatacaggagtggacacccgaatctggtaccacaatctccccgagatcccagaataatgaagaagggggagactattatgatgatgagctgttctctgatgtccaagatattaaaacagccttggccaaaatacacgaggataatcagaagataatctccaagctagaatcactgctgttattgaagggagaagttgagtcaattaagaagcagatcaacaggcaaaatatcagcatatccaccctggaaggacacctctcaagcatcatgatcgccattcctggacttgggaaggatcccaacgaccccactgcagatgtcgaaatcaatcccgacttgaaacccatcataggcagagattcaggccgagcactggccgaagttctcaagaaacccgttgccagccgacaactccaaggaatgacaaatggacggaccagttccagaggacagctgctgaaggaatttcagctaaagccgatcgggaaaaagatgagctcagccgtcgggtttgttcctgacaccggccctgcatcacgcagtgtaatccgctccattataaaatccagccggctagaggaggatcggaagcgttacctgatgactctccttgatgatatcaaaggagccaatgatcttgccaagttccaccagatgctgatgaagataataatgaagtagctacagctcaacttacctgccaaccccatgccagtcgacccaactagtacaacctaaatccattataaaaaacttaggagcaaagtgattgcctcccaagttccacaatgacagagacctacgacttcgacaagtcggcatgggacatcaaagggtcgatcgctccgatacaacccaccacctacagtgatggcaggctggtgccccaggtcagagtcatagatcctggtctaggcgacaggaaggatgaatgctttatgtacatgtttctgctgggggttgttgaggacagcgattccctagggcctccaatcgggcgagcatttgggtccctgcccttaggtgttggcagatccacagcaaagcccgaaaaactcctcaaagaggccactgagcttgacatagttgttagacgtacagcagggctcaatgaaaaactggtgttctacaacaacaccccactaactctcctcacaccttggagaaaggtcctaacaacagggagtgtcttcaacgcaaaccaagtgtgcaatgcggttaatctgataccgctcgataccccgcagaggttccgtgttgtttatatgagcatcacccgtctttcggataacgggtattacaccgttcctagaagaatgctggaattcagatcggtcaatgcagtggccttcaacctgctggtgacccttaggattgacaaggcgataggccctgggaagatcatcgacaatacagagcaacttcctgaggcaacatttatggtccacatcgggaacttcaggagaaagaagagtgaagtctactctgccgattattgcaaaatgaaaatcgaaaagatgggcctggtttttgcacttggtgggatagggggcaccagtcttcacattagaagcacaggcaaaatgagcaagactctccatgcacaactcgggttcaagaagaccttatgttacccgctgatggatatcaatgaagaccttaatcgattactctggaggagcagatgcaagatagtaagaatccaggcagttttgcagccatcagttcctcaagaattccgcatttacgacgacgtgatcataaatgatgaccaaggactattcaaagttctgtagaccgtagtgcccagcaatgcccgaaaacgacccccctcacaatgacagccagaaggcccggacaaaaaagccccctccgaaagactccacggaccaagcgagaggccagccagcagccgacggcaagcgcgaacaccaggcggccccagcacagaacagccccgacacaaggccaccaccagccaccccaatctgcatcctcctcgtgggacccccgaggaccaacccccaaggctgcccccgatccaaaccaccaaccgcatccccaccacccccgggaaagaaacccccagcaattggaaggcccctccccctcttcctcaacacaagaactccacaaccgaaccgcacaagcgaccgaggtgacccaaccgcaggcatccgactccctagacagatcctctctccccggcaaactaaacaaaacttagggccaaggaacatacacacccaacagaacccagaccccggcccacggcgccgcgcccccaacccccgacaaccagagggagcccccaaccaatcccgccggctcccccggtgcccacaggcagggacaccaacccccgaacagacccagcacccaaccatcgacaatccaagacgggggggcccccccaaaaaaaggcccccaggggccgacagccagcaccgcgaggaagcccacccaccccacacacgaccacggcaaccaaaccagaacccagaccaccctgggccaccagctcccagactcggccatcaccccgcagaaaggaaaggccacaacccgcgcaccccagccccgatccggcggggagccacccaacccgaaccagcacccaagagcgatccccgaaggacccccgaaccgcaaaggacaccagtatcccacagcctctccaagtcccccggtctcctcctcttctcgaagggaccaaaagatcaatccaccacacccgacgacactcaactccccacccctaaaggagacaccgggaatcccagaatcaagactcatccaatgtccatcatgggtctcaaggtgaacgtctctgccatattcatggcagtactgttaactctccaaacacccaccggtcaaatccattggggcaatctctctaagataggggtggtaggaataggaagtgcaagctacaaagttatgactcgttccagccatcaatcattagtcataaaattaatgcccaatataactctcctcaataactgcacgagggtagagattgcagaatacaggagactactgagaacagttttggaaccaattagagatgcacttaatgcaatgacccagaatataagaccggttcagagtgtagcttcaagtaggagacacaagagatttgcgggagtagtcctggcaggtgcggccctaggcgttgccacagctgctcagataacagccggcattgcacttcaccagtccatgctgaactctcaagccatcgacaatctgagagcgagcctggaaactactaatcaggcaattgaggcaatcagacaagcagggcaggagatgatattggctgttcagggtgtccaagactacatcaataatgagctgataccgtctatgaaccaactatcttgtgatttaatcggccagaagctcgggctcaaattgctcagatactatacagaaatcctgtcattatttggccccagtttacgggaccccatatctgcggagatatctatccaggctttgagctatgcgcttggaggagacatcaataaggtgttagaaaagctcggatacagtggaggtgatttactgggcatcttagagagcggaggcatcaaggcccggataactcacgtcgacacagagtcctacttcattgtcctcagtatagcctatccgacgctgtccgagattaagggggtgattgtccaccggctagagggggtctcgtacaacataggctctcaagagtggtataccactgtgcccaagtatgttgcaacccaagggtaccttatctcgaattttgatgagtcatcgtgtactttcatgccagaggggactgtgtgcagccaaaatgccttgtacccgatgagtcctctgctccaagaatgcctccgggggtacaccaagtcctgtgctcgtacactcgtatccgggtcttttgggaaccggttcattttatcacaagggaacctaatagccaattgtgcatcaatcctttgcaagtgttacacaacaggaacgatcattaatcaagaccctgacaagatcctaacatacattgctgccgatcactgcccggtagtcgaggtgaacggcgtgatcatccaagtcgggagcaggaggtatccagacgctgtgtacttgcacagaattgacctcggtcctcccatatcattggagaggttggacgtagggacaaatctggggaatgcaattgctaagttggaggatgccaaggaattgttggagtcatcggaccagatattgaggagtatgaaaggtttatcgagcactagcatagtctacatcctgattgcagtgtgtcttggagggttgatagggatccccgctttaatatgttgctgcagggggcgttgtaacaaaaagggagaacaagttggtatgtcaagaccaggcctaaagcctgatcttacgggaacatcaaaatcctatgtaaggtcgctctgatcctctacaactcttgaaacacaaatgtcccacaagtctcctcttcgtcatcaagcaaccaccgcacccagcatcaagcccacctgaaattatctccggcttccctctggccgaacaatatcggtagttaattaaaacttagggtgcaagatcatccacaatgtcaccacaacgagaccggataaatgccttctacaaagataacccccatcccaagggaagtaggatagtcattaacagagaacatcttatgattgatagaccttatgttttgctggctgttctgtttgtcatgtttctgagcttgatcgggttgctagccattgcaggcattagacttcatcgggcagccatctacaccgcagagatccataaaagcctcagcaccaatctagatgtaactaactcaatcgagcatcaggtcaaggacgtgctgacaccactcttcaaaatcatcggtgatgaagtgggcctgaggacacctcagagattcactgacctagtgaaattcatctctgacaagatcaagttccttaatccggatagggagtacgacttcagagatctcacttggtgtatcaacccgccagagagaatcaaattggattatgatcaatactgtgcagatgtggctgctgaagagctcatgaatgcattggtgaactcaactctactggagaccagaacaaccaatcagttcctagctgtctcaaagggaaactgctcagggcccactacaatcagaggtcaattctcaaacatgtcgctgtccctgttagacttgtatttaggtcgaggttacaatgtgtcatctatagtcactatgacatcccagggaatgtatgggggaacttacctagtggaaaagcctaatctgagcagcaaaaggtcagagttgtcacaactgagcatgtaccgagtgtttgaagtaggtgttatcagaaatccgggtttgggggctccggtgttccatatgacaaactatcttgagcaaccagtcagtaatgatctcagcaactgtatggtggctttgggggagctcaaactcgcagccctttgtcacggggaagattctatcacaattccctatcagggatcagggaaaggtgtcagcttccagctcgtcaagctaggtgtctggaaatccccaaccgacatgcaatcctgggtccccttatcaacggatgatccagtgatagacaggctttacctctcatctcacagaggtgttatcgctgacaatcaagcaaaatgggctgtcccgacaacacgaacagatgacaagttgcgaatggagacatgcttccaacaggcgtgtaagggtaaaatccaagcactctgcgagaatcccgagtgggcaccattgaaggataacaggattccttcatacggggtcttgtctgttgatctgagtctgacagttgagcttaaaatcaaaattgcttcgggattcgggccattgatcacacacggttcagggatggacctatacaaatccaaccacaacaatgtgtattggctgactatcccgccaatgaagaacctagccttaggtgtaatcaacacattggagtggataccgagattcaaggttagtccctacctcttcactgtcccaattaaggaagcaggcgaagactgccatgccccaacatacctacctgcggaggtggatggtgatgtcaaactcagttccaatctggtgattctacctggtcaagatctccaatatgttttggcaacctacgatacttccagggttgaacatgctgtggtttattacgtttacagcccaagccgctcattttcttacttttatccttttaggttgcctataaagggggtccccatcgaattacaagtggaatgcttcacatgggaccaaaaactctggtgccgtcacttctgtgtgcttgcggactcagaatctggtggacatatcactcactctgggatggtgggcatgggagtcagctgcacagtcacccgggaagatggaaccaatcgcagatagggctgctagtgaaccaatcacatgatgtcacccagacatcaggcatacccactagtgtgaaatagacatcagaattaagaaaaacgtagggtccaagtggttccccgttatggactcgctatctgtcaaccagatcttataccctgaagttcacctagatagcccgatagttaccaataagatagtagccatcctggagtatgctcgagtccctcacgcttacagcctggaggaccctacactgtgtcagaacatcaagcaccgcctaaaaaacggattttccaaccaaatgattataaacaatgtggaagttgggaatgtcatcaagtccaagcttaggagttatccggcccactctcatattccatatccaaattgtaatcaggatttatttaacatagaagacaaagagtcaacgaggaagatccgtgaactcctcaaaaaggggaattcgctgtactccaaagtcagtgataaggttttccaatgcttaagggacactaactcacggcttggcctaggctccgaattgagggaggacatcaaggagaaagttattaacttgggagtttacatgcacagctcccagtggtttgagccctttctgttttggtttacagtcaagactgagatgaggtcagtgattaaatcacaaacccatacttgccataggaggagacacacacctgtattcttcactggtagttcagttgagttgctaatctctcgtgaccttgttgctataatcagtaaagagtctcaacatgtatattacctgacatttgaactggttttgatgtattgtgatgtcatagaggggaggttaatgacagagaccgctatgactattgatgctaggtatacagagcttctaggaagagtcagatacatgtggaaactgatagatggtttcttccctgcactcgggaatccaacttatcaaattgtagccatgctggagcctctttcacttgcttacctgcagctgagggatataacagtagaactcagaggtgctttccttaaccactgctttactgaaatacatgatgttcttgaccaaaacgggttttctgatgaaggtacttatcatgagttaattgaagctctagattacattttcataactgatgacatacatctgacaggggagattttctcatttttcagaagtttcggccaccccagacttgaagcagtaacggctgctgaaaatgttaggaaatacatgaatcagcctaaagtcattgtgtatgagactctgatgaaaggtcatgccatattttgtggaatcataatcaacggctatcgtgacaggcacggaggcagttggccaccgctgaccctccccctgcatgctgcagacacaatccggaatgctcaagcttcaggtgaagggttaacacatgagcagtgcgttgataactggaaatcttttgctggagtgaaatttggctgctttatgcctcttagcctggatagtgatctgacaatgtacctaaaggacaaggcacttgctgctctccaaagggaatgggattcagtttacccgaaagagttcctgcgttacgaccctcccaagggaaccgggtcacggaggcttgtagatgttttccttaatgattcgagctttgacccatatgatgtgataatgtatgttgtaagtggagcttacctccatgaccctgagttcaacctgtcttacagcctgaaagaaaaggagatcaaggaaacaggtagactttttgctaaaatgacttacaaaatgagggcatgccaagtgattgctgaaaatctaatctcaaacgggattggcaaatattttaaggacaatgggatggccaaggatgagcacgatttgactaaggcactccacactctagctgtctcaggagtccccaaagatctcaaagaaagtcacaggggggggccagtcttaaaaacctactcccgaagcccagtccacacaagtaccaggaacgtgagagcagcaaaagggtttatagggttccctcaagtaattcggcaggaccaagacactgatcatccggagaatatggaagcttacgagacagtcagtgcatttatcacgactgatctcaagaagtactgccttaattggagatatgagaccatcagcttgtttgcacagaggctaaatgagatttacggattgccctcatttttccagtggctgcataagaggcttgagacctctgtcctgtatgtaagtgaccctcattgcccccccgaccttgacgcccatatcccgttatataaagtccccaatgatcaaatcttcattaagtaccctatgggaggtatagaagggtattgtcagaagctgtggaccatcagcaccattccctatctatacctggctgcttatgagagcggagtaaggattgcttcgttagtgcaaggggacaatcagaccatagccgtaacaaaaagggtacccagcacatggccctacaaccttaagaaacgggaagctgctagagtaactagagattactttgtaattcttaggcaaaggctacatgatattggccatcacctcaaggcaaatgagacaattgtttcatcacatttttttgtctattcaaaaggaatatattatgatgggctacttgtgtcccaatcactcaagagcatcgcaagatgtgtattctggtcagagactatagttgatgaaacaagggcagcatgcagtaatattgctacaacaatggctaaaagcatcgagagaggttatgaccgttaccttgcatattccctgaacgtcctaaaagtgatacagcaaattctgatctctcttggcttcacaatcaattcaaccatgacccgggatgtagtcatacccctcctcacaaacaacgacctcttaataaggatggcactgttgcccgctcctattggggggatgaattatctgaatatgagcaggctgtttgtcagaaacatcggtgatccagtaacatcatcaattgctgatctcaagagaatgattctcgcctcactaatgcctgaagagaccctccatcaagtaatgacacaacaaccgggggactcttcattcctagactgggctagcgacccttactcagcaaatcttgtatgtgtccagagcatcactagactcctcaagaacataactgcaaggtttgtcctgatccatagtccaaacccaatgttaaaaggattattccatgatgacagtaaagaagaggacgagggactggcggcattcctcatggacaggcatattatagtacctagggcagctcatgaaatcctggatcatagtgtcacaggggcaagagagtctattgcaggcatgctggataccacaaaaggcttgattcgagccagcatgaggaagggggggttaacctctcgagtgataaccagattgtccaattatgactatgaacaattcagagcagggatggtgctattgacaggaagaaagcgaaatgtcctcattgacaaagagtcatgttcagtgcagctggcgagagctctaagaagccatatgtgggcgaggctagctcgaggacggcctatttacggccttgaggtccctgatgtactagaatctatgcgaggccaccttattcggcgtcatgagacatgtgtcatctgcgagtgtggatcagtcaactacggatggttttttgtcccctcgggttgccaactggatgatattgacaaggaaacatcatccttgagagtcccatatattggttctaccactgatgagagaacagacatgaagcttgccttcgtaagagccccaagtcgatccttgcgatctgctgttagaatagcaacagtgtactcatgggcttacggtgatgatgatagctcttggaacgaagcctggttgttggctaggcaaagggccaatgtgagcctggaggagctaagggtgatcactcccatctcaacttcgactaatttagcgcataggttgagggatcgtagcactcaagtgaaatactcaggtacatcccttgtccgagtggcgaggtataccacaatctccaacgacaatctctcatttgtcatatcagataagaaggttgatactaactttatataccaacaaggaatgcttctagggttgggtgttttagaaacattgtttcgactcgagaaagataccggatcatctaacacggtattacatcttcacgtcgaaacagattgttgcgtgatcccgatgatagatcatcccaggatacccagctcccgcaagctagagctgagggcagagctatgtaccaacccattgatatatgataatgcacctttaattgacagagatgcaacaaggctatacacccagagccataggaggcaccttgtggaatttgttacatggtccacaccccaactatatcacattttagctaagtccacagcactatctatgattgacctggtaacaaaatttgagaaggaccatatgaatgaaatttcagctctcataggggatgacgatatcaatagtttcataactgagtttctgctcatagagccaagattattcactatctacttgggccagtgtgcggccatcaattgggcatttgatgtacattatcatagaccatcagggaaatatcagatgggtgagctgttgtcatcgttcctttctagaatgagcaaaggagtgtttaaggtgcttgtcaatgctctaagccacccaaagatctacaagaaattctggcattgtggtattatagagcctatccatggtccttcacttgatgctcaaaacttgcacacaactgtgtgcaacatggtttacacatgctatatgacctacctcgacctgttgttgaatgaagagttagaagagttcacatttctcttgtgtgaaagcgacgaggatgtagtaccggacagattcgacaacatccaggcaaaacacttatgtgttctggcagatttgtactgtcaaccagggacctgcccaccaattcgaggtctaagaccggtagagaaatgtgcagttctaaccgaccatatcaaggcagaggctatgttatctccagcaggatcttcgtggaacataaatccaattattgtagaccattactcatgctctctgacttatctccggcgaggatcgatcaaacagataagattgagagttgatccaggattcattttcgacgccctcgctgaggtaaatgtcagtcagccaaagatcggcagcaacaacatctcaaatatgagcatcaaggctttcagacccccacacgatgatgttgcaaaattgctcaaagatatcaacacaagcaagcacaatcttcccatttcagggggcaatctcgccaattatgaaatccatgctttccgcagaatcgggttgaactcatctgcttgctacaaagctgttgagatatcaacattaattaggagatgccttgagccaggggaggacggcttgttcttgggtgagggatcgggttctatgttgatcacttataaggagatacttaaactaaacaagtgcttctataatagtggggtttccgccaattctagatctggtcaaagggaattagcaccctatccctccgaagttggccttgtcgaacacagaatgggagtaggtaatattgtcaaagtgctctttaacgggaggcccgaagtcacgtgggtaggcagtgtagattgcttcaatttcatagttagtaatatccctacctctagtgtggggtttatccattcagatatagagaccttgcctgacaaagatactatagagaagctagaggaattggcagccatcttatcgatggctctgctcctgggcaaaataggatcaatactggtgattaagcttatgcctttcagcggggattttgttcagggatttataagttatgtagggtctcattatagagaagtgaaccttgtataccctagatacagcaacttcatctctactgaatcttatttggttatgacagatctcaaggctaaccggctaatgaatcctgaaaagattaagcagcagataattgaatcatctgtgaggacttcacctggacttataggtcacatcctatccattaagcaactaagctgcatacaagcaattgtgggagacgcagttagtagaggtgatatcaatcctactctgaaaaaacttacacctatagagcaggtgctgatcaattgcgggttggcaattaacggacctaagctgtgcaaagaattgatccaccatgatgttgcctcagggcaagatggattgcttaattctatactcatcctctacagggagttggcaagattcaaagacaaccaaagaagtcaacaagggatgttccacgcttaccccgtattggtaagtagcaggcaacgagaacttatatctaggatcacccgcaaattctgggggcacattcttctttactccgggaacagaaagttgataaataagtttatccagaatctcaagtccggctatctgatactagacttacaccagaatatcttcgttaagaatctatccaagtcagagaaacagattattatgacggggggtttgaaacgtgagtgggtttttaaggtaacagtcaaggagaccaaagaatggtataagttagtcggatacagtgccctgattaaggactaattggttgaactccggaaccctaatcctgccctaggtggttaggcattatttgcaatatattaaagaaaactttgaaaatacgaagtttctattcccagctttgtctggtggccggcatggtcccagcctcctcgctggcgccggctgggcaacattccgaggggaccgtcccctcggtaatggcgaatgggacgcggccggtcgatcgacgatccggctgctaacaaagcccgaaaggaagctgagttggctgctgccaccgctgagcaataactagcataaccccttggggcctctaaacgggtcttgaggggttttttgctgaaaggaggaactatatccggatcgagatcaattctgtgagcgtatggcaaacgaaggaaaaatagttatagtagccgcactcgatgggacatttcaacgtaaaccgtttaataatattttgaatcttattccattatctgaaatggtggtaaaactaactgctgtgtgtatgaaatgctttaaggaggcttccttttctaaacgattgggtgaggaaaccgagatagaaataataggaggtaatgatatgtatcaatcggtgtgtagaaagtgttacatcgactcataatattatattttttatctaaaaaactaaaaataaacattgattaaattttaatataatacttaaaaatggatgttgtgtcgttagataaaccgtttatgtattttgaggaaattgataatgagttagattacgaaccagaaagtgcaaatgaggtcgcaaaaaaactgccgtatcaaggacagttaaaactattactaggagaattattttttcttagtaagttacagcgacacggtatattagatggtgccaccgtagtgtatataggatctgctcccggtacacatatacgttatttgagagatcatttctataatttaggagtgatcccgaaaggaagctgagttggctgctgccaccgctgagcaataactagcataaccccttggggcctctaaacgggtcttgaggggttttttgctgaaaggaggaacgcgcctgatgcggtattttctccttacgcatctgtgcggtatttcacaccgcatatatggtgcactctcagtacaatctgctctgatgccgcatagttaagccagccccgacacccgccaacacccgctgacgcgccctgacgggcttgtctgctcccggcatccgcttacagacaagctgtgaccgtctccgggagctgcatgtgtcagaggttttcaccgtcatcaccgaaacgcgcgagacgaaagggcctcgtgatacgcctatttttataggttaatgtcatgataataatggtttcttagacgtcaggtggcacttttcggggaaatgtgcgcggaacccctatttgtttatttttctaaatacattcaaatatgtatccgctcatgagacaataaccctgataaatgcttcaataatattgaaaaaggaagagtatgagtattcaacatttccgtgtcgcccttattcccttttttgcggcattttgccttcctgtttttgctcacccagaaacgctggtgaaagtaaaagatgctgaagatcagttgggtgcacgagtgggttacatcgaactggatctcaacagcggtaagatccttgagagttttcgccccgaagaacgttttccaatgatgagcacttttaaagttctgctatgtggcgcggtattatcccgtattgacgccgggcaagagcaactcggtcgccgcatacactattctcagaatgacttggttgagtactcaccagtcacagaaaagcatcttacggatggcatgacagtaagagaattatgcagtgctgccataaccatgagtgataacactgcggccaacttacttctgacaacgatcggaggaccgaaggagctaaccgcttttttgcacaacatgggggatcatgtaactcgccttgatcgttgggaaccggagctgaatgaagccataccaaacgacgagcgtgacaccacgatgcctgtagcaatggcaacaacgttgcgcaaactattaactggcgaactacttactctagcttcccggcaacaattaatagactggatggaggcggataaagttgcaggaccacttctgcgctcggcccttccggctggctggtttattgctgataaatctggagccggtgagcgtgggtctcgcggtatcattgcagcactggggccagatggtaagccctcccgtatcgtagttatctacacgacggggagtcaggcaactatggatgaacgaaatagacagatcgctgagataggtgcctcactgattaagcattggtaactgtcagaccaagtttactcatatatactttagattgatttaaaacttcatttttaatttaaaaggatctaggtgaagatcctttttgataatctcatgaccaaaatcccttaacgtgagttttcgttccactgagcgtcagaccccgtagaaaagatcaaaggatcttcttgagatcctttttttctgcgcgtaatctgctgcttgcaaacaaaaaaaccaccgctaccagcggtggtttgtttgccggatcaagagctaccaactctttttccgaaggtaactggcttcagcagagcgcagataccaaatactgtccttctagtgtagccgtagttaggccaccacttcaagaactctgtagcaccgcctacatacctcgctctgctaatcctgttaccagtggctgctgccagtggcgataagtcgtgtcttaccgggttggactcaagacgatagttaccggataaggcgcagcggtcgggctgaacggggggttcgtgcacacagcccagcttggagcgaacgacctacaccgaactgagatacctacagcgtgagcattgagaaagcgccacgcttcccgaagggagaaaggcggacaggtatccggtaagcggcagggtcggaacaggagagcgcacgagggagcttccagggggaaacgcctggtatctttatagtcctgtcgggtttcgccacctctgacttgagcgtcgatttttgtgatgctcgtcaggggggcggagcctatggaaaaacgccagcaacgcggcctttttacggttcctggccttttgctggccttttgctcacatgttctttcctgcgttatcccctgattctgtggataaccgtattaccgcctttgagtgagctgataccgctcgccgcagccgaacgaccgagcgcagcgagtcagtgagcgaggaagcggaagagcgcccaatacgcaaaccgcctctccccgcgcgttggccgattcattaatgcagctggcacgacaggtttcccgactggaaagcgggcagtgagcgcaacgcaattaatgtgagttagctcactcattaggcaccccaggctttacactttatgcttccggctcgtatgttgtgtggaattgtgagcggataacaatttcacacaggaaacagctatgaccatgattacgccaagcttacgcgtcctggcattatgcccagtacatgaccttatgggactttcctacttggcagtacatctacgtattagtcatcgctattaccatggtgatgcggttttggcagtacatcaatgggcgtggatagcggtttgactcacggggatttccaagtctccaccccattgacgtcaatgggagtttgttttggcaccaaaatcaacgggactttccaaaatgtcgtaacaactccgccccattgacgcaaatgggcggtaggcgtgtacggtgggaggtctatataagcagagctcgtttagtgaaccgtgg

SEQ ID NO: 38 - DNA, 36172 bp, Artificial Sequence
  Vector with soluble s4-1BBL ectodomain construct
catcatcaataatataccttattttggattgaagccaatatgataatgagggggtggagtttgtgacgtggcgcggggcgtgggaacggggcgggtgacgtagtagtgtggcggaagtgtgatgttgcaagtgtggcggaacacatgtaagcgacggatgtggcaaaagtgacgtttttggtgtgcgccggtgtacacaggaagtgacaattttcgcgcggttttaggcggatgttgtagtaaatttgggcgtaaccgagtaagatttggccattttcgcgggaaaactgaataagaggaagtgaaatctgaataattttgtgttactcatagcgcgtaatatttgtctagggccgcggggactttgaccgtttacgtggagactcgcccaggtgtttttctcaggtgttttccgcgttccgggtcaaagttggcgttttattattatagtcagtcgaagcttggatccggtacctctagaattctcgagcggccgctagcgacatcggatctcccgatcccctatggtcgactctcagtacaatctgctctgatgccgcatagttaagccagtatctgctccctgcttgtgtgttggaggtcgctgagtagtgcgcgagcaaaatttaagctacaacaaggcaaggcttgaccgacaattgcatgaagaatctgcttagggttaggcgttttgcgctgcttcgcgatgtacgggccagatatacgcgttgacattgattattgactagttattaatagtaatcaattacggggtcattagttcatagcccatatatggagttccgcgttacataacttacggtaaatggcccgcctggctgaccgcccaacgacccccgcccattgacgtcaataatgacgtatgttcccatagtaacgccaatagggactttccattgacgtcaatgggtggactatttacggtaaactgcccacttggcagtacatcaagtgtatcatatgccaagtacgccccctattgacgtcaatgacggtaaatggcccgcctggcattatgcccagtacatgaccttatgggactttcctacttggcagtacatctacgtattagtcatcgctattaccatggtgatgcggttttggcagtacatcaatgggcgtggatagcggtttgactcacggggatttccaagtctccaccccattgacgtcaatgggagtttgttttggcaccaaaatcaacgggactttccaaaatgtcgtaacaactccgccccattgacgcaaatgggcggtaggcgtgtacggtgggaggtctatataagcagagctctctggctaactagagaacccactgcttactggcttatcgaaattaatacgactcactatagggagacccaagctggctagttaagctatcaacaagtttgtacaaaaaagcaggctgccaccatgcccatggggtctctgcaaccgctggccaccttgtacctgctggggatgctggtcgcttcctgcctcggacttgatcttcgacaagggatgtttgcacagctcgtagcacaaaacgttctgctcatcgacggccccttgtcctggtactcagacccaggattggccggtgtcagtcttaccggcggactcagctacaaggaggacactaaagagttggtcgtggcaaaggcaggcgtgtattatgtgttcttccaactggaactgaggagggttgtggccggtgaaggcagcggttccgtcagtttggcgctgcacctgcagcctttgaggagtgccgcaggtgctgctgcattggctctgactgtcgacctgccacctgcctcatccgaggctagaaattctgcctttggatttcaaggcagactgttgcatctgtcagcagggcagagacttggggtgcacctccatactgaggcaagagctagacacgcttggcagctcacccaaggggccactgttcttggactcttccgggtgacaccagagatacccgcaggactcccaagtccaaggagtgaaggcggtggcggaagcggtggaggtggatctggcggaggtggaagtcttgacctgcggcagggcatgttcgctcaattggtggcccagaatgttcttctgatcgatggtcctctgtcttggtattctgatcctggcttggcaggggtgtcacttactggtggtctttcatataaagaagacacaaaggagctcgtggtggctaaagctggagtttattacgtgttttttcaattggaactccggagagtggttgccggcgaaggttccggttctgtttctcttgctctgcacttgcaaccactgagaagtgctgcaggcgcagctgctttggctttgaccgtggatttgcctcctgcttcttccgaagccagaaacagcgcttttggctttcaaggaaggctcctgcatctctctgccggccaacgactgggagtgcatttgcacactgaagcacgcgcaagacatgcatggcagcttactcaaggagctacggtgctcggattgtttcgggtcacccctgagatacctgctgggctgcctagtcctagatcagaaggaggtggtggctctggtggaggaggttctggagggggaggaagcctggatctgcgacaaggcatgtttgcccagctcgttgcacaaaatgtgctgctgatcgacggacctctctcctggtattccgatcccgggttggctggagttagtctcacgggaggactgtcctacaaagaagatacgaaggaactcgtggtcgcaaaagctggggtttactacgtttttttccaacttgagctgcggagagttgtcgccggagaagggagcggatctgtatcattggcacttcaccttcagccgctcagatctgctgcaggtgccgctgcacttgctttgactgtggatctgcctccagcctcttctgaagcccgcaactctgcgtttggattccaagggagactgctccacctcagtgctggccaaagacttggagtccatctgcacacagaagcgagagccagacatgcctggcagctcactcagggggctactgtcctcggactgtttagagtcactccagaaataccagccggcctgccttcacctcgaagcgaataaacccagctttcttgtacaaagtggttgatctagagggcccgcggttcgaaggtaagcctatccctaaccctctcctcggtctcgattctacgcgtaccggttagtaatgagtttaaacgggggaggctaactgaaacacggaaggagacaataccggaaggaacccgcgctatgacggcaataaaaagacagaataaaacgcacgggtgttgggtcgtttgttcataaacgcggggttcggtcccagggctggcactctgtcgataccccaccgagaccccattggggccaatacgcccgcgtttcttccttttccccaccccaccccccaagttcgggtgaaggcccagggctcgcagccaacgtcggggcggcaggccctgccatagcagatccgattcgacagatcactgaaatgtgtgggcgtggcttaagggtgggaaagaatatataaggtgggggtcttatgtagttttgtatctgttttgcagcagccgccgccgccatgagcaccaactcgtttgatggaagcattgtgagctcatatttgacaacgcgcatgcccccatgggccggggtgcgtcagaatgtgatgggctccagcattgatggtcgccccgtcctgcccgcaaactctactaccttgacctacgagaccgtgtctggaacgccgttggagactgcagcctccgccgccgcttcagccgctgcagccaccgcccgcgggattgtgactgactttgctttcctgagcccgcttgcaagcagtgcagcttcccgttcatccgcccgcgatgacaagttgacggctcttttggcacaattggattctttgacccgggaacttaatgtcgtttctcagcagctgttggatctgcgccagcaggtttctgccctgaaggcttcctcccctcccaatgcggtttaaaacataaataaaaaaccagactctgtttggatttggatcaagcaagtgtcttgctgtctttatttaggggttttgcgcgcgcggtaggcccgggaccagcggtctcggtcgttgagggtcctgtgtattttttccaggacgtggtaaaggtgactctggatgttcagatacatgggcataagcccgtctctggggtggaggtagcaccactgcagagcttcatgctgcggggtggtgttgtagatgatccagtcgtagcaggagcgctgggcgtggtgcctaaaaatgtctttcagtagcaagctgattgccaggggcaggcccttggtgtaagtgtttacaaagcggttaagctgggatgggtgcatacgtggggatatgagatgcatcttggactgtatttttaggttggctatgttcccagccatatccctccggggattcatgttgtgcagaaccaccagcacagtgtatccggtgcacttgggaaatttgtcatgtagcttagaaggaaatgcgtggaagaacttggagacgcccttgtgacctccaagattttccatgcattcgtccataatgatggcaatgggcccacgggcggcggcctgggcgaagatatttctgggatcactaacgtcatagttgtgttccaggatgagatcgtcataggccatttttacaaagcgcgggcggagggtgccagactgcggtataatggttccatccggcccaggggcgtagttaccctcacagatttgcatttcccacgctttgagttcagatggggggatcatgtctacctgcggggcgatgaagaaaacggtttccggggtaggggagatcagctgggaagaaagcaggttcctgagcagctgcgacttaccgcagccggtgggcccgtaaatcacacctattaccgggtgcaactggtagttaagagagctgcagctgccgtcatccctgagcaggggggccacttcgttaagcatgtccctgactcgcatgttttccctgaccaaatccgccagaaggcgctcgccgcccagcgatagcagttcttgcaaggaagcaaagtttttcaacggtttgagaccgtccgccgtaggcatgcttttgagcgtttgaccaagcagttccaggcggtcccacagctcggtcacctgctctacggcatctcgatccagcatatctcctcgtttcgcgggttggggcggctttcgctgtacggcagtagtcggtgctcgtccagacgggccagggtcatgtctttccacgggcgcagggtcctcgtcagcgtagtctgggtcacggtgaaggggtgcgctccgggctgcgcgctggccagggtgcgcttgaggctggtcctgctggtgctgaagcgctgccggtcttcgccctgcgcgtcggccaggtagcatttgaccatggtgtcatagtccagcccctccgcggcgtggcccttggcgcgcagcttgcccttggaggaggcgccgcacgaggggcagtgcagacttttgagggcgtagagcttgggcgcgagaaataccgattccggggagtaggcatccgcgccgcaggccccgcagacggtctcgcattccacgagccaggtgagctctggccgttcggggtcaaaaaccaggtttcccccatgctttttgatgcgtttcttacctctggtttccatgagccggtgtccacgctcggtgacgaaaaggctgtccgtgtccccgtatacagacttgagaggcctgtcctcgagcggtgttccgcggtcctcctcgtatagaaactcggaccactctgagacaaaggctcgcgtccaggccagcacgaaggaggctaagtgggaggggtagcggtcgttgtccactagggggtccactcgctccagggtgtgaagacacatgtcgccctcttcggcatcaaggaaggtgattggtttgtaggtgtaggccacgtgaccgggtgttcctgaaggggggctataaaagggggtgggggcgcgttcgtcctcactctcttccgcatcgctgtctgcgagggccagctgttggggtgagtactccctctgaaaagcgggcatgacttctgcgctaagattgtcagtttccaaaaacgaggaggatttgatattcacctggcccgcggtgatgcctttgagggtggccgcatccatctggtcagaaaagacaatctttttgttgtcaagcttggtggcaaacgacccgtagagggcgttggacagcaacttggcgatggagcgcagggtttggtttttgtcgcgatcggcgcgctccttggccgcgatgtttagctgcacgtattcgcgcgcaacgcaccgccattcgggaaagacggtggtgcgctcgtcgggcaccaggtgcacgcgccaaccgcggttgtgcagggtgacaaggtcaacgctggtggctacctctccgcgtaggcgctcgttggtccagcagaggcggccgcccttgcgcgagcagaatggcggtagggggtctagctgcgtctcgtccggggggtctgcgtccacggtaaagaccccgggcagcaggcgcgcgtcgaagtagtctatcttgcatccttgcaagtctagcgcctgctgccatgcgcgggcggcaagcgcgcgctcgtatgggttgagtgggggaccccatggcatggggtgggtgagcgcggaggcgtacatgccgcaaatgtcgtaaacgtagaggggctctctgagtattccaagatatgtagggtagcatcttccaccgcggatgctggcgcgcacgtaatcgtatagttcgtgcgagggagcgaggaggtcgggaccgaggttgctacgggcgggctgctctgctcggaagactatctgcctgaagatggcatgtgagttggatgatatggttggacgctggaagacgttgaagctggcgtctgtgagacctaccgcgtcacgcacgaaggaggcgtaggagtcgcgcagcttgttgaccagctcggcggtgacctgcacgtctagggcgcagtagtccagggtttccttgatgatgtcatacttatcctgtcccttttttttccacagctcgcggttgaggacaaactcttcgcggtctttccagtactcttggatcggaaacccgtcggcctccgaacggtaagagcctagcatgtagaactggttgacggcctggtaggcgcagcatcccttttctacgggtagcgcgtatgcctgcgcggccttccggagcgaggtgtgggtgagcgcaaaggtgtccctgaccatgactttgaggtactggtatttgaagtcagtgtcgtcgcatccgccctgctcccagagcaaaaagtccgtgcgctttttggaacgcggatttggcagggcgaaggtgacatcgttgaagagtatctttcccgcgcgaggcataaagttgcgtgtgatgcggaagggtcccggcacctcggaacggttgttaattacctgggcggcgagcacgatctcgtcaaagccgttgatgttgtggcccacaatgtaaagttccaagaagcgcgggatgcccttgatggaaggcaattttttaagttcctcgtaggtgagctcttcaggggagctgagcccgtgctctgaaagggcccagtctgcaagatgagggttggaagcgacgaatgagctccacaggtcacgggccattagcatttgcaggtggtcgcgaaaggtcctaaactggcgacctatggccattttttctggggtgatgcagtagaaggtaagcgggtcttgttcccagcggtcccatccaaggttcgcggctaggtctcgcgcggcagtcactagaggctcatctccgccgaacttcatgaccagcatgaagggcacgagctgcttcccaaaggcccccatccaagtataggtctctacatcgtaggtgacaaagagacgctcggtgcgaggatgcgagccgatcgggaagaactggatctcccgccaccaattggaggagtggctattgatgtggtgaaagtagaagtccctgcgacgggccgaacactcgtgctggcttttgtaaaaacgtgcgcagtactggcagcggtgcacgggctgtacatcctgcacgaggttgacctgacgaccgcgcacaaggaagcagagtgggaatttgagcccctcgcctggcgggtttggctggtggtcttctacttcggctgcttgtccttgaccgtctggctgctcgaggggagttacggtggatcggaccaccacgccgcgcgagcccaaagtccagatgtccgcgcgcggcggtcggagcttgatgacaacatcgcgcagatgggagctgtccatggtctggagctcccgcggcgtcaggtcaggcgggagctcctgcaggtttacctcgcatagacgggtcagggcgcgggctagatccaggtgatacctaatttccaggggctggttggtggcggcgtcgatggcttgcaagaggccgcatccccgcggcgcgactacggtaccgcgcggcgggcggtgggccgcgggggtgtccttggatgatgcatctaaaagcggtgacgcgggcgagcccccggaggtagggggggctccggacccgccgggagagggggcaggggcacgtcggcgccgcgcgcgggcaggagctggtgctgcgcgcgtaggttgctggcgaacgcgacgacgcggcggttgatctcctgaatctggcgcctctgcgtgaagacgacgggcccggtgagcttgagcctgaaagagagttcgacagaatcaatttcggtgtcgttgacggcggcctggcgcaaaatctcctgcacgtctcctgagttgtcttgataggcgatctcggccatgaactgctcgatctcttcctcctggagatctccgcgtccggctcgctccacggtggcggcgaggtcgttggaaatgcgggccatgagctgcgagaaggcgttgaggcctccctcgttccagacgcggctgtagaccacgcccccttcggcatcgcgggcgcgcatgaccacctgcgcgagattgagctccacgtgccgggcgaagacggcgtagtttcgcaggcgctgaaagaggtagttgagggtggtggcggtgtgttctgccacgaagaagtacataacccagcgtcgcaacgtggattcgttgatatcccccaaggcctcaaggcgctccatggcctcgtagaagtccacggcgaagttgaaaaactgggagttgcgcgccgacacggttaactcctcctccagaagacggatgagctcggcgacagtgtcgcgcacctcgcgctcaaaggctacaggggcctcttcttcttcttcaatctcctcttccataagggcctccccttcttcttcttctggcggcggtgggggaggggggacacggcggcgacgacggcgcaccgggaggcggtcgacaaagcgctcgatcatctccccgcggcgacggcgcatggtctcggtgacggcgcggccgttctcgcgggggcgcagttggaagacgccgcccgtcatgtcccggttatgggttggcggggggctgccatgcggcagggatacggcgctaacgatgcatctcaacaattgttgtgtaggtactccgccgccgagggacctgagcgagtccgcatcgaccggatcggaaaacctctcgagaaaggcgtctaaccagtcacagtcgcaaggtaggctgagcaccgtggcgggcggcagcgggcggcggtcggggttgtttctggcggaggtgctgctgatgatgtaattaaagtaggcggtcttgagacggcggatggtcgacagaagcaccatgtccttgggtccggcctgctgaatgcgcaggcggtcggccatgccccaggcttcgttttgacatcggcgcaggtctttgtagtagtcttgcatgagcctttctaccggcacttcttcttctccttcctcttgtcctgcatctcttgcatctatcgctgcggcggcggcggagtttggccgtaggtggcgccctcttcctcccatgcgtgtgaccccgaagcccctcatcggctgaagcagggctaggtcggcgacaacgcgctcggctaatatggcctgctgcacctgcgtgagggtagactggaagtcatccatgtccacaaagcggtggtatgcgcccgtgttgatggtgtaagtgcagttggccataacggaccagttaacggtctggtgacccggctgcgagagctcggtgtacctgagacgcgagtaagccctcgagtcaaatacgtagtcgttgcaagtccgcaccaggtactggtatcccaccaaaaagtgcggcggcggctggcggtagaggggccagcgtagggtggccggggctccgggggcgagatcttccaacataaggcgatgatatccgtagatgtacctggacatccaggtgatgccggcggcggtggtggaggcgcgcggaaagtcgcggacgcggttccagatgttgcgcagcggcaaaaagtgctccatggtcgggacgctctggccggtcaggcgcgcgcaatcgttgacgctctagaccgtgcaaaaggagagcctgtaagcgggcactcttccgtggtctggtggataaattcgcaagggtatcatggcggacgaccggggttcgagccccgtatccggccgtccgccgtgatccatgcggttaccgcccgcgtgtcgaacccaggtgtgcgacgtcagacaacgggggagtgctccttttggcttccttccaggcgcggcggctgctgcgctagcttttttggccactggccgcgcgcagcgtaagcggttaggctggaaagcgaaagcattaagtggctcgctccctgtagccggagggttattttccaagggttgagtcgcgggacccccggttcgagtctcggaccggccggactgcggcgaacgggggtttgcctccccgtcatgcaagaccccgcttgcaaattcctccggaaacagggacgagccccttttttgcttttcccagatgcatccggtgctgcggcagatgcgcccccctcctcagcagcggcaagagcaagagcagcggcagacatgcagggcaccctcccctcctcctaccgcgtcaggaggggcgacatccgcggttgacgcggcagcagatggtgattacgaacccccgcggcgccgggcccggcactacctggacttggaggagggcgagggcctggcgcggctaggagcgccctctcctgagcggtacccaagggtgcagctgaagcgtgatacgcgtgaggcgtacgtgccgcggcagaacctgtttcgcgaccgcgagggagaggagcccgaggagatgcgggatcgaaagttccacgcagggcgcgagctgcggcatggcctgaatcgcgagcggttgctgcgcgaggaggactttgagcccgacgcgcgaaccgggattagtcccgcgcgcgcacacgtggcggccgccgacctggtaaccgcatacgagcagacggtgaaccaggagattaactttcaaaaaagctttaacaaccacgtgcgtacgcttgtggcgcgcgaggaggtggctataggactgatgcatctgtgggactttgtaagcgcgctggagcaaaacccaaatagcaagccgctcatggcgcagctgttccttatagtgcagcacagcagggacaacgaggcattcagggatgcgctgctaaacatagtagagcccgagggccgctggctgctcgatttgataaacatcctgcagagcatagtggtgcaggagcgcagcttgagcctggctgacaaggtggccgccatcaactattccatgcttagcctgggcaagttttacgcccgcaagatataccataccccttacgttcccatagacaaggaggtaaagatcgaggggttctacatgcgcatggcgctgaaggtgcttaccttgagcgacgacctgggcgtttatcgcaacgagcgcatccacaaggccgtgagcgtgagccggcggcgcgagctcagcgaccgcgagctgatgcacagcctgcaaagggccctggctggcacgggcagcggcgatagagaggccgagtcctactttgacgcgggcgctgacctgcgctgggccccaagccgacgcgccctggaggcagctggggccggacctgggctggcggtggcacccgcgcgcgctggcaacgtcggcggcgtggaggaatatgacgaggacgatgagtacgagccagaggacggcgagtactaagcggtgatgtttctgatcagatgatgcaagacgcaacggacccggcggtgcgggcggcgctgcagagccagccgtccggccttaactccacggacgactggcgccaggtcatggaccgcatcatgtcgctgactgcgcgcaatcctgacgcgttccggcagcagccgcaggccaaccggctctccgcaattctggaagcggtggtcccggcgcgcgcaaaccccacgcacgagaaggtgctggcgatcgtaaacgcgctggccgaaaacagggccatccggcccgacgaggccggcctggtctacgacgcgctgcttcagcgcgtggctcgttacaacagcggcaacgtgcagaccaacctggaccggctggtgggggatgtgcgcgaggccgtggcgcagcgtgagcgcgcgcagcagcagggcaacctgggctccatggttgcactaaacgccttcctgagtacacagcccgccaacgtgccgcggggacaggaggactacaccaactttgtgagcgcactgcggctaatggtgactgagacaccgcaaagtgaggtgtaccagtctgggccagactattttttccagaccagtagacaaggcctgcagaccgtaaacctgagccaggctttcaaaaacttgcaggggctgtggggggtgcgggctcccacaggcgaccgcgcgaccgtgtctagcttgctgacgcccaactcgcgcctgttgctgctgctaatagcgcccttcacggacagtggcagcgtgtcccgggacacatacctaggtcacttgctgacactgtaccgcgaggccataggtcaggcgcatgtggacgagcatactttccaggagattacaagtgtcagccgcgcgctggggcaggaggacacgggcagcctggaggcaaccctaaactacctgctgaccaaccggcggcagaagatcccctcgttgcacagtttaaacagcgaggaggagcgcattttgcgctacgtgcagcagagcgtgagccttaacctgatgcgcgacggggtaacgcccagcgtggcgctggacatgaccgcgcgcaacatggaaccgggcatgtatgcctcaaaccggccgtttatcaaccgcctaatggactacttgcatcgcgcggccgccgtgaaccccgagtatttcaccaatgccatcttgaacccgcactggctaccgccccctggtttctacaccgggggattcgaggtgcccgagggtaacgatggattcctctgggacgacatagacgacagcgtgttttccccgcaaccgcagaccctgctagagttgcaacagcgcgagcaggcagaggcggcgctgcgaaaggaaagcttccgcaggccaagcagcttgtccgatctaggcgctgcggccccgcggtcagatgctagtagcccatttccaagcttgatagggtctcttaccagcactcgcaccacccgcccgcgcctgctgggcgaggaggagtacctaaacaactcgctgctgcagccgcagcgcgaaaaaaacctgcctccggcatttcccaacaacgggatagagagcctagtggacaagatgagtagatggaagacgtacgcgcaggagcacagggacgtgccaggcccgcgcccgcccacccgtcgtcaaaggcacgaccgtcagcggggtctggtgtgggaggacgatgactcggcagacgacagcagcgtcctggatttgggagggagtggcaacccgtttgcgcaccttcgccccaggctggggagaatgttttaaaaaaaaaaaagcatgatgcaaaataaaaaactcaccaaggccatggcaccgagcgttggttttcttgtattccccttagtatgcggcgcgcggcgatgtatgaggaaggtcctcctccctcctacgagagtgtggtgagcgcggcgccagtggcggcggcgctgggttctcccttcgatgctcccctggacccgccgtttgtgcctccgcggtacctgcggcctaccggggggagaaacagcatccgttactctgagttggcacccctattcgacaccacccgtgtgtacctggtggacaacaagtcaacggatgtggcatccctgaactaccagaacgaccacagcaactttctgaccacggtcattcaaaacaatgactacagcccgggggaggcaagcacacagaccatcaatcttgacgaccggtcgcactggggcggcgacctgaaaaccatcctgcataccaacatgccaaatgtgaacgagttcatgtttaccaataagtttaaggcgcgggtgatggtgtcgcgcttgcctactaaggacaatcaggtggagctgaaatacgagtgggtggagttcacgctgcccgagggcaactactccgagaccatgaccatagaccttatgaacaacgcgatcgtggagcactacttgaaagtgggcagacagaacggggttctggaaagcgacatcggggtaaagtttgacacccgcaacttcagactggggtttgaccccgtcactggtcttgtcatgcctggggtatatacaaacgaagccttccatccagacatcattttgctgccaggatgcggggtggacttcacccacagccgcctgagcaacttgttgggcatccgcaagcggcaacccttccaggagggctttaggatcacctacgatgatctggagggtggtaacattcccgcactgttggatgtggacgcctaccaggcgagcttgaaagatgacaccgaacagggcgggggtggcgcaggcggcagcaacagcagtggcagcggcgcggaagagaactccaacgcggcagccgcggcaatgcagccggtggaggacatgaacgatcatgccattcgcggcgacacctttgccacacgggctgaggagaagcgcgctgaggccgaagcagcggccgaagctgccgcccccgctgcgcaacccgaggtcgagaagcctcagaagaaaccggtgatcaaacccctgacagaggacagcaagaaacgcagttacaacctaataagcaatgacagcaccttcacccagtaccgcagctggtaccttgcatacaactacggcgaccctcagaccggaatccgctcatggaccctgctttgcactcctgacgtaacctgcggctcggagcaggtctactggtcgttgccagacatgatgcaagaccccgtgaccttccgctccacgcgccagatcagcaactttccggtggtgggcgccgagctgttgcccgtgcactccaagagcttctacaacgaccaggccgtctactcccaactcatccgccagtttacctctctgacccacgtgttcaatcgctttcccgagaaccagattttggcgcgcccgccagcccccaccatcaccaccgtcagtgaaaacgttcctgctctcacagatcacgggacgctaccgctgcgcaacagcatcggaggagtccagcgagtgaccattactgacgccagacgccgcacctgcccctacgtttacaaggccctgggcatagtctcgccgcgcgtcctatcgagccgcactttttgagcaagcatgtccatccttatatcgcccagcaataacacaggctggggcctgcgcttcccaagcaagatgtttggcggggccaagaagcgctccgaccaacacccagtgcgcgtgcgcgggcactaccgcgcgccctggggcgcgcacaaacgcggccgcactgggcgcaccaccgtcgatgacgccatcgacgcggtggtggaggaggcgcgcaactacacgcccacgccgccaccagtgtccacagtggacgcggccattcagaccgtggtgcgcggagcccggcgctatgctaaaatgaagagacggcggaggcgcgtagcacgtcgccaccgccgccgacccggcactgccgcccaacgcgcggcggcggccctgcttaaccgcgcacgtcgcaccggccgacgggcggccatgcgggccgctcgaaggctggccgcgggtattgtcactgtgccccccaggtccaggcgacgagcggccgccgcagcagccgcggccattagtgctatgactcagggtcgcaggggcaacgtgtattgggtgcgcgactcggttagcggcctgcgcgtgcccgtgcgcacccgccccccgcgcaactagattgcaagaaaaaactacttagactcgtactgttgtatgtatccagcggcggcggcgcgcaacgaagctatgtccaagcgcaaaatcaaagaagagatgctccaggtcatcgcgccggagatctatggccccccgaagaaggaagagcaggattacaagccccgaaagctaaagcgggtcaaaaagaaaaagaaagatgatgatgatgaacttgacgacgaggtggaactgctgcacgctaccgcgcccaggcgacgggtacagtggaaaggtcgacgcgtaaaacgtgttttgcgacccggcaccaccgtagtctttacgcccggtgagcgctccacccgcacctacaagcgcgtgtatgatgaggtgtacggcgacgaggacctgcttgagcaggccaacgagcgcctcggggagtttgcctacggaaagcggcataaggacatgctggcgttgccgctggacgagggcaacccaacacctagcctaaagcccgtaacactgcagcaggtgctgcccgcgcttgcaccgtccgaagaaaagcgcggcctaaagcgcgagtctggtgacttggcacccaccgtgcagctgatggtacccaagcgccagcgactggaagatgtcttggaaaaaatgaccgtggaacctgggctggagcccgaggtccgcgtgcggccaatcaagcaggtggcgccgggactgggcgtgcagaccgtggacgttcagatacccactaccagtagcaccagtattgccaccgccacagagggcatggagacacaaacgtccccggttgcctcagcggtggcggatgccgcggtgcaggcggtcgctgcggccgcgtccaagacctctacggaggtgcaaacggacccgtggatgtttcgcgtttcagccccccggcgcccgcgcggttcgaggaagtacggcgccgccagcgcgctactgcccgaatatgccctacatccttccattgcgcctacccccggctatcgtggctacacctaccgccccagaagacgagcaactacccgacgccgaaccaccactggaacccgccgccgccgtcgccgtcgccagcccgtgctggccccgatttccgtgcgcagggtggctcgcgaaggaggcaggaccctggtgctgccaacagcgcgctaccaccccagcatcgtttaaaagccggtctttgtggttcttgcagatatggccctcacctgccgcctccgtttcccggtgccgggattccgaggaagaatgcaccgtaggaggggcatggccggccacggcctgacgggcggcatgcgtcgtgcgcaccaccggcggcggcgcgcgtcgcaccgtcgcatgcgcggcggtatcctgcccctccttattccactgatcgccgcggcgattggcgccgtgcccggaattgcatccgtggccttgcaggcgcagagacactgattaaaaacaagttgcatgtggaaaaatcaaaataaaaagtctggactctcacgctcgcttggtcctgtaactattttgtagaatggaagacatcaactttgcgtctctggccccgcgacacggctcgcgcccgttcatgggaaactggcaagatatcggcaccagcaatatgagcggtggcgccttcagctggggctcgctgtggagcggcattaaaaatttcggttccaccgttaagaactatggcagcaaggcctggaacagcagcacaggccagatgctgagggataagttgaaagagcaaaatttccaacaaaaggtggtagatggcctggcctctggcattagcggggtggtggacctggccaaccaggcagtgcaaaataagattaacagtaagcttgatccccgccctcccgtagaggagcctccaccggccgtggagacagtgtctccagaggggcgtggcgaaaagcgtccgcgccccgacagggaagaaactctggtgacgcaaatagacgagcctccctcgtacgaggaggcactaaagcaaggcctgcccaccacccgtcccatcgcgcccatggctaccggagtgctgggccagcacacacccgtaacgctggacctgcctccccccgccgacacccagcagaaacctgtgctgccaggcccgaccgccgttgttgtaacccgtcctagccgcgcgtccctgcgccgcgccgccagcggtccgcgatcgttgcggcccgtagccagtggcaactggcaaagcacactgaacagcatcgtgggtctgggggtgcaatccctgaagcgccgacgatgcttctgaatagctaacgtgtcgtatgtgtgtcatgtatgcgtccatgtcgccgccagaggagctgctgagccgccgcgcgcccgctttccaagatggctaccccttcgatgatgccgcagtggtcttacatgcacatctcgggccaggacgcctcggagtacctgagccccgggctggtgcagtttgcccgcgccaccgagacgtacttcagcctgaataacaagtttagaaaccccacggtggcgcctacgcacgacgtgaccacagaccggtcccagcgtttgacgctgcggttcatccctgtggaccgtgaggatactgcgtactcgtacaaggcgcggttcaccctagctgtgggtgataaccgtgtgctggacatggcttccacgtactttgacatccgcggcgtgctggacaggggccctacttttaagccctactctggcactgcctacaacgccctggctcccaagggtgccccaaatccttgcgaatgggatgaagctgctactgctcttgaaataaacctagaagaagaggacgatgacaacgaagacgaagtagacgagcaagctgagcagcaaaaaactcacgtatttgggcaggcgccttattctggtataaatattacaaaggagggtattcaaataggtgtcgaaggtcaaacacctaaatatgccgataaaacatttcaacctgaacctcaaataggagaatctcagtggtacgaaactgaaattaatcatgcagctgggagagtccttaaaaagactaccccaatgaaaccatgttacggttcatatgcaaaacccacaaatgaaaatggagggcaaggcattcttgtaaagcaacaaaatggaaagctagaaagtcaagtggaaatgcaatttttctcaactactgaggcgaccgcaggcaatggtgataacttgactcctaaagtggtattgtacagtgaagatgtagatatagaaaccccagacactcatatttcttacatgcccactattaaggaaggtaactcacgagaactaatgggccaacaatctatgcccaacaggcctaattacattgcttttagggacaattttattggtctaatgtattacaacagcacgggtaatatgggtgttctggcgggccaagcatcgcagttgaatgctgttgtagatttgcaagacagaaacacagagctttcataccagcttttgcttgattccattggtgatagaaccaggtacttttctatgtggaatcaggctgttgacagctatgatccagatgttagaattattgaaaatcatggaactgaagatgaacttccaaattactgctttccactgggaggtgtgattaatacagagactcttaccaaggtaaaacctaaaacaggtcaggaaaatggatgggaaaaagatgctacagaattttcagataaaaatgaaataagagttggaaataattttgccatggaaatcaatctaaatgccaacctgtggagaaatttcctgtactccaacatagcgctgtatttgcccgacaagctaaagtacagtccttccaacgtaaaaatttctgataacccaaacacctacgactacatgaacaagcgagtggtggctcccgggttagtggactgctacattaaccttggagcacgctggtcccttgactatatggacaacgtcaacccatttaaccaccaccgcaatgctggcctgcgctaccgctcaatgttgctgggcaatggtcgctatgtgcccttccacatccaggtgcctcagaagttctttgccattaaaaacctccttctcctgccgggctcatacacctacgagtggaacttcaggaaggatgttaacatggttctgcagagctccctaggaaatgacctaagggttgacggagccagcattaagtttgatagcatttgcctttacgccaccttcttccccatggcccacaacaccgcctccacgcttgaggccatgcttagaaacgacaccaacgaccagtcctttaacgactatctctccgccgccaacatgctctaccctatacccgccaacgctaccaacgtgcccatatccatcccctcccgcaactgggcggctttccgcggctgggccttcacgcgccttaagactaaggaaaccccatcactgggctcgggctacgacccttattacacctactctggctctataccctacctagatggaaccttttacctcaaccacacctttaagaaggtggccattacctttgactcttctgtcagctggcctggcaatgaccgcctgcttacccccaacgagtttgaaattaagcgctcagttgacggggagggttacaacgttgcccagtgtaacatgaccaaagactggttcctggtacaaatgctagctaactacaacattggctaccagggcttctatatcccagagagctacaaggaccgcatgtactccttctttagaaacttccagcccatgagccgtcaggtggtggatgatactaaatacaaggactaccaacaggtgggcatcctacaccaacacaacaactctggatttgttggctaccttgcccccaccatgcgcgaaggacaggcctaccctgctaacttcccctatccgcttataggcaagaccgcagttgacagcattacccagaaaaagtttctttgcgatcgcaccctttggcgcatcccattctccagtaactttatgtccatgggcgcactcacagacctgggccaaaaccttctctacgccaactccgcccacgcgctagacatgacttttgaggtggatcccatggacgagcccacccttctttatgttttgtttgaagtctttgacgtggtccgtgtgcaccggccgcaccgcggcgtcatcgaaaccgtgtacctgcgcacgcccttctcggccggcaacgccacaacataaagaagcaagcaacatcaacaacagctgccgccatgggctccagtgagcaggaactgaaagccattgtcaaagatcttggttgtgggccatattttttgggcacctatgacaagcgctttccaggctttgtttctccacacaagctcgcctgcgccatagtcaatacggccggtcgcgagactgggggcgtacactggatggcctttgcctggaacccgcactcaaaaacatgctacctctttgagccctttggcttttctgaccagcgactcaagcaggtttaccagtttgagtacgagtcactcctgcgccgtagcgccattgcttcttcccccgaccgctgtataacgctggaaaagtccacccaaagcgtacaggggcccaactcggccgcctgtggactattctgctgcatgtttctccacgcctttgccaactggccccaaactcccatggatcacaaccccaccatgaaccttattaccggggtacccaactccatgctcaacagtccccaggtacagcccaccctgcgtcgcaaccaggaacagctctacagcttcctggagcgccactcgccctacttccgcagccacagtgcgcagattaggagcgccacttctttttgtcacttgaaaaacatgtaaaaataatgtactagagacactttcaataaaggcaaatgcttttatttgtacactctcgggtgattatttacccccacccttgccgtctgcgccgtttaaaaatcaaaggggttctgccgcgcatcgctatgcgccactggcagggacacgttgcgatactggtgtttagtgctccacttaaactcaggcacaaccatccgcggcagctcggtgaagttttcactccacaggctgcgcaccatcaccaacgcgtttagcaggtcgggcgccgatatcttgaagtcgcagttggggcctccgccctgcgcgcgcgagttgcgatacacagggttgcagcactggaacactatcagcgccgggtggtgcacgctggccagcacgctcttgtcggagatcagatccgcgtccaggtcctccgcgttgctcagggcgaacggagtcaactttggtagctgccttcccaaaaagggcgcgtgcccaggctttgagttgcactcgcaccgtagtggcatcaaaaggtgaccgtgcccggtctgggcgttaggatacagcgcctgcataaaagccttgatctgcttaaaagccacctgagcctttgcgccttcagagaagaacatgccgcaagacttgccggaaaactgattggccggacaggccgcgtcgtgcacgcagcaccttgcgtcggtgttggagatctgcaccacatttcggccccaccggttcttcacgatcttggccttgctagactgctccttcagcgcgcgctgcccgttttcgctcgtcacatccatttcaatcacgtgctccttatttatcataatgcttccgtgtagacacttaagctcgccttcgatctcagcgcagcggtgcagccacaacgcgcagcccgtgggctcgtgatgcttgtaggtcacctctgcaaacgactgcaggtacgcctgcaggaatcgccccatcatcgtcacaaaggtcttgttgctggtgaaggtcagctgcaacccgcggtgctcctcgttcagccaggtcttgcatacggccgccagagcttccacttggtcaggcagtagtttgaagttcgcctttagatcgttatccacgtggtacttgtccatcagcgcgcgcgcagcctccatgcccttctcccacgcagacacgatcggcacactcagcgggttcatcaccgtaatttcactttccgcttcgctgggctcttcctcttcctcttgcgtccgcataccacgcgccactgggtcgtcttcattcagccgccgcactgtgcgcttacctcctttgccatgcttgattagcaccggtgggttgctgaaacccaccatttgtagcgccacatcttctctttcttcctcgctgtccacgattacctctggtgatggcgggcgctcgggcttgggagaagggcgcttctttttcttcttgggcgcaatggccaaatccgccgccgaggtcgatggccgcgggctgggtgtgcgcggcaccagcgcgtcttgtgatgagtcttcctcgtcctcggactcgatacgccgcctcatccgcttttttgggggcgcccggggaggcggcggcgacggggacggggacgacacgtcctccatggttgggggacgtcgcgccgcaccgcgtccgcgctcgggggtggtttcgcgctgctcctcttcccgactggccatttccttctcctataggcagaaaaagatcatggagtcagtcgagaagaaggacagcctaaccgccccctctgagttcgccaccaccgcctccaccgatgccgccaacgcgcctaccaccttccccgtcgaggcacccccgcttgaggaggaggaagtgattatcgagcaggacccaggttttgtaagcgaagacgacgaggaccgctcagtaccaacagaggataaaaagcaagaccaggacaacgcagaggcaaacgaggaacaagtcgggcggggggacgaaaggcatggcgactacctagatgtgggagacgacgtgctgttgaagcatctgcagcgccagtgcgccattatctgcgacgcgttgcaagagcgcagcgatgtgcccctcgccatagcggatgtcagccttgcctacgaacgccacctattctcaccgcgcgtaccccccaaacgccaagaaaacggcacatgcgagcccaacccgcgcctcaacttctaccccgtatttgccgtgccagaggtgcttgccacctatcacatctttttccaaaactgcaagatacccctatcctgccgtgccaaccgcagccgagcggacaagcagctggccttgcggcagggcgctgtcatacctgatatcgcctcgctcaacgaagtgccaaaaatctttgagggtcttggacgcgacgagaagcgcgcggcaaacgctctgcaacaggaaaacagcgaaaatgaaagtcactctggagtgttggtggaactcgagggtgacaacgcgcgcctagccgtactaaaacgcagcatcgaggtcacccactttgcctacccggcacttaacctaccccccaaggtcatgagcacagtcatgagtgagctgatcgtgcgccgtgcgcagcccctggagagggatgcaaatttgcaagaacaaacagaggagggcctacccgcagttggcgacgagcagctagcgcgctggcttcaaacgcgcgagcctgccgacttggaggagcgacgcaaactaatgatggccgcagtgctcgttaccgtggagcttgagtgcatgcagcggttctttgctgacccggagatgcagcgcaagctagaggaaacattgcactacacctttcgacagggctacgtacgccaggcctgcaagatctccaacgtggagctctgcaacctggtctcctaccttggaattttgcacgaaaaccgccttgggcaaaacgtgcttcattccacgctcaagggcgaggcgcgccgcgactacgtccgcgactgcgtttacttatttctatgctacacctggcagacggccatgggcgtttggcagcagtgcttggaggagtgcaacctcaaggagctgcagaaactgctaaagcaaaacttgaaggacctatggacggccttcaacgagcgctccgtggccgcgcacctggcggacatcattttccccgaacgcctgcttaaaaccctgcaacagggtctgccagacttcaccagtcaaagcatgttgcagaactttaggaactttatcctagagcgctcaggaatcttgcccgccacctgctgtgcacttcctagcgactttgtgcccattaagtaccgcgaatgccctccgccgctttggggccactgctaccttctgcagctagccaactaccttgcctaccactctgacataatggaagacgtgagcggtgacggtctactggagtgtcactgtcgctgcaacctatgcaccccgcaccgctccctggtttgcaattcgcagctgcttaacgaaagtcaaattatcggtacctttgagctgcagggtccctcgcctgacgaaaagtccgcggctccggggttgaaactcactccggggctgtggacgtcggcttaccttcgcaaatttgtacctgaggactaccacgcccacgagattaggttctacgaagaccaatcccgcccgccaaatgcggagcttaccgcctgcgtcattacccagggccacattcttggccaattgcaagccatcaacaaagcccgccaagagtttctgctacgaaagggacggggggtttacttggacccccagtccggcgaggagctcaacccaatccccccgccgccgcagccctatcagcagcagccgcgggcccttgcttcccaggatggcacccaaaaagaagctgcagctgccgccgccacccacggacgaggaggaatactgggacagtcaggcagaggaggttttggacgaggaggaggaggacatgatggaagactgggagagcctagacgaggaagcttccgaggtcgaagaggtgtcagacgaaacaccgtcaccctcggtcgcattcccctcgccggcgccccagaaatcggcaaccggttccagcatggctacaacctccgctcctcaggcgccgccggcactgcccgttcgccgacccaaccgtagatgggacaccactggaaccagggccggtaagtccaagcagccgccgccgttagcccaagagcaacaacagcgccaaggctaccgctcatggcgcgggcacaagaacgccatagttgcttgcttgcaagactgtgggggcaacatctccttcgcccgccgctttcttctctaccatcacggcgtggccttcccccgtaacatcctgcattactaccgtcatctctacagcccatactgcaccggcggcagcggcagcggcagcaacagcagcggccacacagaagcaaaggcgaccggatagcaagactctgacaaagcccaagaaatccacagcggcggcagcagcaggaggaggagcgctgcgtctggcgcccaacgaacccgtatcgacccgcgagcttagaaacaggatttttcccactctgtatgctatatttcaacagagcaggggccaagaacaagagctgaaaataaaaaacaggtctctgcgatccctcacccgcagctgcctgtatcacaaaagcgaagatcagcttcggcgcacgctggaagacgcggaggctctcttcagtaaatactgcgcgctgactcttaaggactagtttcgcgccctttctcaaatttaagcgcgaaaactacgtcatctccagcggccacacccggcgccagcacctgtcgtcagcgccattatgagcaaggaaattcccacgccctacatgtggagttaccagccacaaatgggacttgcggctggagctgcccaagactactcaacccgaataaactacatgagcgcgggaccccacatgatatcccgggtcaacggaatccgcgcccaccgaaaccgaattctcttggaacaggcggctattaccaccacacctcgtaataaccttaatccccgtagttggcccgctgccctggtgtaccaggaaagtcccgctcccaccactgtggtacttcccagagacgcccaggccgaagttcagatgactaactcaggggcgcagcttgcgggcggctttcgtcacagggtgcggtcgcccgggcagggtataactcacctgacaatcagagggcgaggtattcagctcaacgacgagtcggtgagctcctcgcttggtctccgtccggacgggacatttcagatcggcggcgccggccgtccttcattcacgcctcgtcaggcaatcctaactctgcagacctcgtcctctgagccgcgctctggaggcattggaactctgcaatttattgaggagtttgtgccatcggtctactttaaccccttctcgggacctcccggccactatccggatcaatttattcctaactttgacgcggtaaaggactcggcggacggctacgactgaatgttaagtggagaggcagagcaactgcgcctgaaacacctggtccactgtcgccgccacaagtgctttgcccgcgactccggtgagttttgctactttgaattgcccgaggatcatatcgagggcccggcgcacggcgtccggcttaccgcccagggagagcttgcccgtagcctgattcgggagtttacccagcgccccctgctagttgagcgggacaggggaccctgtgttctcactgtgatttgcaactgtcctaaccttggattacatcaagatctttgttgccatctctgtgctgagtataataaatacagaaattaaaatatactggggctcctatcgccatcctgtaaacgccaccgtcttcacccgcccaagcaaaccaaggcgaaccttacctggtacttttaacatctctccctctgtgatttacaacagtttcaacccagacggagtgagtctacgagagaacctctccgagctcagctactccatcagaaaaaacaccaccctccttacctgccgggaacgtacgagtgcgtcaccggccgctgcaccacacctaccgcctgaccgtaaaccagactttttccggacagacctcaataactctgtttaccagaacaggaggtgagcttagaaaacccttagggtattaggccaaaggcgcagctactgtggggtttatgaacaattcaagcaactctacgggctattctaattcaggtttctctagaaatggacggaattattacagagcagcgcctgctagaaagacgcagggcagcggccgagcaacagcgcatgaatcaagagctccaagacatggttaacttgcaccagtgcaaaaggggtatcttttgtctggtaaagcaggccaaagtcacctacgacagtaataccaccggacaccgccttagctacaagttgccaaccaagcgtcagaaattggtggtcatggtgggagaaaagcccattaccataactcagcactcggtagaaaccgaaggctgcattcactcaccttgtcaaggacctgaggatctctgcacccttattaagaccctgtgcggtctcaaagatcttattccctttaactaataaaaaaaaataataaagcatcacttacttaaaatcagttagcaaatttctgtccagtttattcagcagcacctccttgccctcctcccagctctggtattgcagcttcctcctggctgcaaactttctccacaatctaaatggaatgtcagtttcctcctgttcctgtccatccgcacccactatcttcatgttgttgcagatgaagcgcgcaagaccgtctgaagataccttcaaccccgtgtatccatatgacacggaaaccggtcctccaactgtgccttttcttactcctccctttgtatcccccaatgggtttcaagagagtccccctggggtactctctttgcgcctatccgaacctctagttacctccaatggcatgcttgcgctcaaaatgggcaacggcctctctctggacgaggccggcaaccttacctcccaaaatgtaaccactgtgagcccacctctcaaaaaaaccaagtcaaacataaacctggaaatatctgcacccctcacagttacctcagaagccctaactgtggctgccgccgcacctctaatggtcgcgggcaacacactcaccatgcaatcacaggccccgctaaccgtgcacgactccaaacttagcattgccacccaaggacccctcacagtgtcagaaggaaagctagccctgcaaacatcaggccccctcaccaccaccgatagcagtacccttactatcactgcctcaccccctctaactactgccactggtagcttgggcattgacttgaaagagcccatttatacacaaaatggaaaactaggactaaagtacggggctcctttgcatgtaacagacgacctaaacactttgaccgtagcaactggtccaggtgtgactattaataatacttccttgcaaactaaagttactggagccttgggttttgattcacaaggcaatatgcaacttaatgtagcaggaggactaaggattgattctcaaaacagacgccttatacttgatgttagttatccgtttgatgctcaaaaccaactaaatctaagactaggacagggccctctttttataaactcagcccacaacttggatattaactacaacaaaggcctttacttgtttacagcttcaaacaattccaaaaagcttgaggttaacctaagcactgccaaggggttgatgtttgacgctacagccatagccattaatgcaggagatgggcttgaatttggttcacctaatgcaccaaacacaaatcccctcaaaacaaaaattggccatggcctagaatttgattcaaacaaggctatggttcctaaactaggaactggccttagttttgacagcacaggtgccattacagtaggaaacaaaaataatgataagctaactttgtggaccacaccagctccatctcctaactgtagactaaatgcagagaaagatgctaaactcactttggtcttaacaaaatgtggcagtcaaatacttgctacagtttcagttttggctgttaaaggcagtttggctccaatatctggaacagttcaaagtgctcatcttattataagatttgacgaaaatggagtgctactaaacaattccttcctggacccagaatattggaactttagaaatggagatcttactgaaggcacagcctatacaaacgctgttggatttatgcctaacctatcagcttatccaaaatctcacggtaaaactgccaaaagtaacattgtcagtcaagtttacttaaacggagacaaaactaaacctgtaacactaaccattacactaaacggtacacaggaaacaggagacacaactccaagtgcatactctatgtcattttcatgggactggtctggccacaactacattaatgaaatatttgccacatcctcttacactttttcatacattgcccaagaataaagaatcgtttgtgttatgtttcaacgtgtttatttttcaattgcagaaaatttcgaatcatttttcattcagtagtatagccccaccaccacatagcttatacagatcaccgtaccttaatcaaactcacagaaccctagtattcaacctgccacctccctcccaacacacagagtacacagtcctttctccccggctggccttaaaaagcatcatatcatgggtaacagacatattcttaggtgttatattccacacggtttcctgtcgagccaaacgctcatcagtgatattaataaactccccgggcagctcacttaagttcatgtcgctgtccagctgctgagccacaggctgctgtccaacttgcggttgcttaacgggcggcgaaggagaagtccacgcctacatgggggtagagtcataatcgtgcatcaggatagggcggtggtgctgcagcagcgcgcgaataaactgctgccgccgccgctccgtcctgcaggaatacaacatggcagtggtctcctcagcgatgattcgcaccgcccgcagcataaggcgccttgtcctccgggcacagcagcgcaccctgatctcacttaaatcagcacagtaactgcagcacagcaccacaatattgttcaaaatcccacagtgcaaggcgctgtatccaaagctcatggcggggaccacagaacccacgtggccatcataccacaagcgcaggtagattaagtggcgacccctcataaacacgctggacataaacattacctcttttggcatgttgtaattcaccacctcccggtaccatataaacctctgattaaacatggcgccatccaccaccatcctaaaccagctggccaaaacctgcccgccggctatacactgcagggaaccgggactggaacaatgacagtggagagcccaggactcgtaaccatggatcatcatgctcgtcatgatatcaatgttggcacaacacaggcacacgtgcatacacttcctcaggattacaagctcctcccgcgttagaaccatatcccagggaacaacccattcctgaatcagcgtaaatcccacactgcagggaagacctcgcacgtaactcacgttgtgcattgtcaaagtgttacattcgggcagcagcggatgatcctccagtatggtagcgcgggtttctgtctcaaaaggaggtagacgatccctactgtacggagtgcgccgagacaaccgagatcgtgttggtcgtagtgtcatgccaaatggaacgccggacgtagtcatatttcctgaagcaaaaccaggtgcgggcgtgacaaacagatctgcgtctccggtctcgccgcttagatcgctctgtgtagtagttgtagtatatccactctctcaaagcatccaggcgccccctggcttcgggttctatgtaaactccttcatgcgccgctgccctgataacatccaccaccgcagaataagccacacccagccaacctacacattcgttctgcgagtcacacacgggaggagcgggaagagctggaagaaccatgtttttttttttattccaaaagattatccaaaacctcaaaatgaagatctattaagtgaacgcgctcccctccggtggcgtggtcaaactctacagccaaagaacagataatggcatttgtaagatgttgcacaatggcttccaaaaggcaaacggccctcacgtccaagtggacgtaaaggctaaacccttcagggtgaatctcctctataaacattccagcaccttcaaccatgcccaaataattctcatctcgccaccttctcaatatatctctaagcaaatcccgaatattaagtccggccattgtaaaaatctgctccagagcgccctccaccttcagcctcaagcagcgaatcatgattgcaaaaattcaggttcctcacagacctgtataagattcaaaagcggaacattaacaaaaataccgcgatcccgtaggtcccttcgcagggccagctgaacataatcgtgcaggtctgcacggaccagcgcggccacttccccgccaggaaccttgacaaaagaacccacactgattatgacacgcatactcggagctatgctaaccagcgtagccccgatgtaagctttgttgcatgggcggcgatataaaatgcaaggtgctgctcaaaaaatcaggcaaagcctcgcgcaaaaaagaaagcacatcgtagtcatgctcatgcagataaaggcaggtaagctccggaaccaccacagaaaaagacaccatttttctctcaaacatgtctgcgggtttctgcataaacacaaaataaaataacaaaaaaacatttaaacattagaagcctgtcttacaacaggaaaaacaacccttataagcataagacggactacggccatgccggcgtgaccgtaaaaaaactggtcaccgtgattaaaaagcaccaccgacagctcctcggtcatgtccggagtcataatgtaagactcggtaaacacatcaggttgattcacatcggtcagtgctaaaaagcgaccgaaatagcccgggggaatacatacccgcaggcgtagagacaacattacagcccccataggaggtataacaaaattaataggagagaaaaacacataaacacctgaaaaaccctcctgcctaggcaaaatagcaccctcccgctccagaacaacatacagcgcttccacagcggcagccataacagtcagccttaccagtaaaaaagaaaacctattaaaaaaacaccactcgacacggcaccagctcaatcagtcacagtgtaaaaaagggccaagtgcagagcgagtatatataggactaaaaaatgacgtaacggttaaagtccacaaaaaacacccagaaaaccgcacgcgaacctacgcccagaaacgaaagccaaaaaacccacaacttcctcaaatcgtcacttccgttttcccacgttacgtcacttcccattttaagaaaactacaattcccaacacatacaagttactccgccctaaaacctacgtcacccgccccgttcccacgccccgcgccacgtcacaaactccaccccctcattatcatattggcttcaatccaaaataaggtatattattgatgatgttaattaatttaaatccgcatgcgatatcgagctctcccgggaattcggatctgcgacgcgaggctggatggccttccccattatgattcttctcgcttccggcggcatcgggatgcccgcgttgcaggccatgctgtccaggcaggtagatgacgaccatcagggacagcttcacggccagcaaaaggccaggaaccgtaaaaaggccgcgttgctggcgtttttccataggctccgcccccctgacgagcatcacaaaaatcgacgctcaagtcagaggtggcgaaacccgacaggactataaagataccaggcgtttccccctggaagctccctcgtgcgctctcctgttccgaccctgccgcttaccggatacctgtccgcctttctcccttcgggaagcgtggcgctttctcaatgctcacgctgtaggtatctcagttcggtgtaggtcgttcgctccaagctgggctgtgtgcacgaaccccccgttcagcccgaccgctgcgccttatccggtaactatcgtcttgagtccaacccggtaagacacgacttatcgccactggcagcagccactggtaacaggattagcagagcgaggtatgtaggcggtgctacagagttcttgaagtggtggcctaactacggctacactagaaggacagtatttggtatctgcgctctgctgaagccagttaccttcggaaaaagagttggtagctcttgatccggcaaacaaaccaccgctggtagcggtggtttttttgtttgcaagcagcagattacgcgcagaaaaaaaggatctcaagaagatcctttgatcttttctacggggtctgacgctcagtggaacgaaaactcacgttaagggattttggtcatgagattatcaaaaaggatcttcacctagatccttttaaatcaatctaaagtatatatgagtaaacttggtctgacagttaccaatgcttaatcagtgaggcacctatctcagcgatctgtctatttcgttcatccatagttgcctgactccccgtcgtgtagataactacgatacgggagggcttaccatctggccccagtgctgcaatgataccgcgagacccacgctcaccggctccagatttatcagcaataaaccagccagccggaagggccgagcgcagaagtggtcctgcaactttatccgcctccatccagtctattaattgttgccgggaagctagagtaagtagttcgccagttaatagtttgcgcaacgttgttgccattgctgcaggcatcgtggtgtcacgctcgtcgtttggtatggcttcattcagctccggttcccaacgatcaaggcgagttacatgatcccccatgttgtgcaaaaaagcggttagctccttcggtcctccgatcgttgtcagaagtaagttggccgcagtgttatcactcatggttatggcagcactgcataattctcttactgtcatgccatccgtaagatgcttttctgtgactggtgagtactcaaccaagtcattctgagaatagtgtatgcggcgaccgagttgctcttgcccggcgtcaacacgggataataccgcgccacatagcagaactttaaaagtgctcatcattggaaaacgttcttcggggcgaaaactctcaaggatcttaccgctgttgagatccagttcgatgtaacccactcgtgcacccaactgatcttcagcatcttttactttcaccagcgtttctgggtgagcaaaaacaggaaggcaaaatgccgcaaaaaagggaataagggcgacacggaaatgttgaatactcatactcttcctttttcaatattattgaagcatttatcagggttattgtctcatgagcggatacatatttgaatgtatttagaaaaataaacaaataggggttccgcgcacatttccccgaaaagtgccacctgacgtctaagaaaccattattatcatgacattaacctataaaaataggcgtatcacgaggccctttcgtcttcaaggatccgaattcccgggagagctcgatatcgcatgcggatttaaattaattaa

SEQ ID NO: 39 - DNA, 21594 bp, Artificial Sequence
  Vector with soluble s4-1BBL ectodomain construct
accaaacaaagttgggtaaggatagttcaatcaatgatcatcttctagtgcacttaggattcaagatcctattatcagggacaagagcaggattagggatatctcgaggcgcgtgccaccatgcccatggggtctctgcaaccgctggccaccttgtacctgctggggatgctggtcgcttcctgcctcggaggcgttcgactttgggctacaagacaggcaatgctgggccaggtccatgaggttcctgaggggtggctcattttcgtggccgagcaggaggagctgtatgttcgcgtgcaaaacggctttaggaaggtccagctggaagcgcggacacctttgcccaggggaaccgataacgagggctcacttgatcttcgacaagggatgtttgcacagctcgtagcacaaaacgttctgctcatcgacggccccttgtcctggtactcagacccaggattggccggtgtcagtcttaccggcggactcagctacaaggaggacactaaagagttggtcgtggcaaaggcaggcgtgtattatgtgttcttccaactggaactgaggagggttgtggccggtgaaggcagcggttccgtcagtttggcgctgcacctgcagcctttgaggagtgccgcaggtgctgctgcattggctctgactgtcgacctgccacctgcctcatccgaggctagaaattctgcctttggatttcaaggcagactgttgcatctgtcagcagggcagagacttggggtgcacctccatactgaggcaagagctagacacgcttggcagctcacccaaggggccactgttcttggactcttccgggtgacaccagagatacccgcaggactcccaagtccaaggagtgaaggcggtggcggaagcggtggaggtggatctggcggaggtggaagtcttgacctgcggcagggcatgttcgctcaattggtggcccagaatgttcttctgatcgatggtcctctgtcttggtattctgatcctggcttggcaggggtgtcacttactggtggtctttcatataaagaagacacaaaggagctcgtggtggctaaagctggagtttattacgtgttttttcaattggaactccggagagtggttgccggcgaaggttccggttctgtttctcttgctctgcacttgcaaccactgagaagtgctgcaggcgcagctgctttggctttgaccgtggatttgcctcctgcttcttccgaagccagaaacagcgcttttggctttcaaggaaggctcctgcatctctctgccggccaacgactgggagtgcatttgcacactgaagcacgcgcaagacatgcatggcagcttactcaaggagctacggtgctcggattgtttcgggtcacccctgagatacctgctgggctgcctagtcctagatcagaaggaggtggtggctctggtggaggaggttctggagggggaggaagcctggatctgcgacaaggcatgtttgcccagctcgttgcacaaaatgtgctgctgatcgacggacctctctcctggtattccgatcccgggttggctggagttagtctcacgggaggactgtcctacaaagaagatacgaaggaactcgtggtcgcaaaagctggggtttactacgtttttttccaacttgagctgcggagagttgtcgccggagaagggagcggatctgtatcattggcacttcaccttcagccgctcagatctgctgcaggtgccgctgcacttgctttgactgtggatctgcctccagcctcttctgaagcccgcaactctgcgtttggattccaagggagactgctccacctcagtgctggccaaagacttggagtccatctgcacacagaagcgagagccagacatgcctggcagctcactcagggggctactgtcctcggactgtttagagtcactccagaaataccagccggcctgccttcacctcgaagcgaataaacgcgccatccatcattgttataaaaaacttaggattcaagatcctattatcagggacaagagcaggattagggatatccgagatggccacacttttaaggagcttagcattgttcaaaagaaacaaggacaaaccacccattacatcaggatccggtggagccatcagaggaatcaaacacattattatagtaccaatccctggagattcctcaattaccactcgatccagacttctggaccggttggtgaggttaattggaaacccggatgtgagcgggcccaaactaacaggggcactaataggtatattatccttatttgtggagtctccaggtcaattgattcagaggatcaccgatgaccctgacgttagcataaggctgttagaggttgtccagagtgaccagtcacaatctggccttaccttcgcatcaagaggtaccaacatggaggatgaggcggaccaatacttttcacatgatgatccaattagtagtgatcaatccaggttcggatggttcgggaacaaggaaatctcagatattgaagtgcaagaccctgagggattcaacatgattctgggtaccatcctagcccaaatttgggtcttgctcgcaaaggcggttacggccccagacacggcagctgattcggagctaagaaggtggataaagtacacccaacaaagaagggtagttggtgaatttagattggagagaaaatggttggatgtggtgaggaacaggattgccgaggacctctccttacgccgattcatggtcgctctaatcctggatatcaagagaacacccggaaacaaacccaggattgctgaaatgatatgtgacattgatacatatatcgtagaggcaggattagccagttttatcctgactattaagtttgggatagaaactatgtatcctgctcttggactgcatgaatttgctggtgagttatccacacttgagtccttgatgaacctttaccagcaaatgggggaaactgcaccctacatggtaatcctggagaactcaattcagaacaagttcagtgcaggatcataccctctgctctggagctatgccatgggagtaggagtggaacttgaaaactccatgggaggtttgaactttggccgatcttactttgatccagcatattttagattagggcaagagatggtaaggaggtcagctggaaaggtcagttccacattggcatctgaactcggtatcactgccgaggatgcaaggcttgtttcagagattgcaatgcatactactgaggacaagatcagtagagcggttggacccagacaagcccaagtatcatttctacacggtgatcaaagtgagaatgagctaccgagattggggggcaaggaagataggagggtcaaacagagtcgaggagaagccagggagagctacagagaaaccgggcccagcagagcaagtgatgcgagagctgcccatcttccaaccggcacacccctagacattgacactgcaacggagtccagccaagatccgcaggacagtcgaaggtcagctgacgccctgcttaggctgcaagccatggcaggaatctcggaagaacaaggctcagacacggacacccctatagtgtacaatgacagaaatcttctagactaggtgcgagaggccgagggccagaacaacatccgcctaccatccatcattgttataaaaaacttaggaaccaggtccacacagccgccagcccatcaaccatccactcccacgattggagccaatggcagaagagcaggcacgccatgtcaaaaacggactggaatgcatccgggctctcaaggccgagcccatcggctcactggccatcgaggaagctatggcagcatggtcagaaatatcagacaacccaggacaggagcgagccacctgcagggaagagaaggcaggcagttcgggtctcagcaaaccatgcctctcagcaattggatcaactgaaggcggtgcacctcgcatccgcggtcagggacctggagagagcgatgacgacgctgaaactttgggaatccccccaagaaatctccaggcatcaagcactgggttacagtgttattacgtttatgatcacagcggtgaagcggttaagggaatccaagatgctgactctatcatggttcaatcaggccttgatggtgatagcaccctctcaggaggagacaatgaatctgaaaacagcgatgtggatattggcgaacctgataccgagggatatgctatcactgaccggggatctgctcccatctctatggggttcagggcttctgatgttgaaactgcagaaggaggggagatccacgagctcctgagactccaatccagaggcaacaactttccgaagcttgggaaaactctcaatgttcctccgcccccggaccccggtagggccagcacttccgggacacccattaaaaagggcacagacgcgagattagcctcatttggaacggagatcgcgtctttattgacaggtggtgcaacccaatgtgctcgaaagtcaccctcggaaccatcagggccaggtgcacctgcggggaatgtccccgagtgtgtgagcaatgccgcactgatacaggagtggacacccgaatctggtaccacaatctccccgagatcccagaataatgaagaagggggagactattatgatgatgagctgttctctgatgtccaagatattaaaacagccttggccaaaatacacgaggataatcagaagataatctccaagctagaatcactgctgttattgaagggagaagttgagtcaattaagaagcagatcaacaggcaaaatatcagcatatccaccctggaaggacacctctcaagcatcatgatcgccattcctggacttgggaaggatcccaacgaccccactgcagatgtcgaaatcaatcccgacttgaaacccatcataggcagagattcaggccgagcactggccgaagttctcaagaaacccgttgccagccgacaactccaaggaatgacaaatggacggaccagttccagaggacagctgctgaaggaatttcagctaaagccgatcgggaaaaagatgagctcagccgtcgggtttgttcctgacaccggccctgcatcacgcagtgtaatccgctccattataaaatccagccggctagaggaggatcggaagcgttacctgatgactctccttgatgatatcaaaggagccaatgatcttgccaagttccaccagatgctgatgaagataataatgaagtagctacagctcaacttacctgccaaccccatgccagtcgacccaactagtacaacctaaatccattataaaaaacttaggagcaaagtgattgcctcccaaggtccacaatgacagagacctacgacttcgacaagtcggcatgggacatcaaagggtcgatcgctccgatacaacccaccacctacagtgatggcaggctggtgccccaggtcagagtcatagatcctggtctaggcgacaggaaggatgaatgctttatgtacatgtttctgctgggggttgttgaggacagcgattccctagggcctccaatcgggcgagcatttgggttcctgcccttaggtgttggcagatccacagcaaagcccgaaaaactcctcaaagaggccactgagcttgacatagttgttagacgtacagcagggctcaatgaaaaactggtgttctacaacaacaccccactaactctcctcacaccttggagaaaggtcctaacaacagggagtgtcttcaacgcaaaccaagtgtgcaatgcggttaatctgataccgctcgataccccgcagaggttccgtgttgtttatatgagcatcacccgtctttcggataacgggtattacaccgttcctagaagaatgctggaattcagatcggtcaatgcagtggccttcaacctgctggtgacccttaggattgacaaggcgataggccctgggaagatcatcgacaatacagagcaacttcctgaggcaacatttatggtccacatcgggaacttcaggagaaagaagagtgaagtctactctgccgattattgcaaaatgaaaatcgaaaagatgggcctggtttttgcacttggtgggatagggggcaccagtcttcacattagaagcacaggcaaaatgagcaagactctccatgcacaactcgggttcaagaagaccttatgttacccgctgatggatatcaatgaagaccttaatcgattactctggaggagcagatgcaagatagtaagaatccaggcagttttgcagccatcagttcctcaagaattccgcatttacgacgacgtgatcataaatgatgaccaaggactattcaaagttctgtagaccgtagtgcccagcaatgcccgaaaacgacccccctcacaatgacagccagaaggcccggacaaaaaagccccctccgaaagactccacggaccaagcgagaggccagccagcagccgacggcaagcgcgaacaccaggcggccccagcacagaacagccctgacacaaggccaccaccagccaccccaatctgcatcctcctcgtgggacccccgaggaccaacccccaaggctgcccccgatccaaaccaccaaccgcatccccaccacccccgggaaagaaacccccagcaattggaaggcccctccccctcttcctcaacacaagaactccacaaccgaaccgcacaagcgaccgaggtgacccaaccgcaggcatccgactccctagacagatcctctctccccggcaaactaaacaaaacttagggccaaggaacatacacacccaacagaacccagaccccggcccacggcgccgcgcccccaacccccgacaaccagagggagcccccaaccaatcccgccggctcccccggtgcccacaggcagggacaccaacccccgaacagacccagcacccaaccatcgacaatccaagacgggggggcccccccaaaaaaaggcccccaggggccgacagccagcaccgcgaggaagcccacccaccccacacacgaccacggcaaccaaaccagaacccagaccaccctgggccaccagctcccagactcggccatcaccccgcagaaaggaaaggccacaacccgcgcaccccagccccgatccggcggggagccacccaacccgaaccagcacccaagagcgatccccgaaggacccccgaaccgcaaaggacatcagtatcccacagcctctccaagtcccccggtctcctcctcttctcgaagggaccaaaagatcaatccaccacacccgacgacactcaactccccacccctaaaggagacaccgggaatcccagaatcaagactcatccaatgtccatcatgggtctcaaggtgaacgtctctgccatattcatggcagtactgttaactctccaaacacccaccggtcaaatccattggggcaatctctctaagataggggtggtaggaataggaagtgcaagctacaaagttatgactcgttccagccatcaatcattagtcataaaattaatgcccaatataactctcctcaataactgcacgagggtagagattgcagaatacaggagactactgagaacagttttggaaccaattagagatgcacttaatgcaatgacccagaatataagaccggttcagagtgtagcttcaagtaggagacacaagagatttgcgggagtagtcctggcaggtgcggccctaggcgttgccacagctgctcagataacagccggcattgcacttcaccagtccatgctgaactctcaagccatcgacaatctgagagcgagcctggaaactactaatcaggcaattgagacaatcagacaagcagggcaggagatgatattggctgttcagggtgtccaagactacatcaataatgagctgataccgtctatgaaccaactatcttgtgatttaatcggccagaagctcgggctcaaattgctcagatactatacagaaatcctgtcattatttggccccagtttacgggaccccatatctgcggagatatctatccaggctttgagctatgcgcttggaggagacatcaataaggtgttagaaaagctcggatacagtggaggtgatttactgggcatcttagagagcggaggcatcaaggcccggataactcacgtcgacacagagtcctacttcattgtcctcagtatagcctatccgacgctgtccgagattaagggggtgattgtccaccggctagagggggtctcgtacaacataggctctcaagagtggtataccactgtgcccaagtatgttgcaacccaagggtaccttatctcgaattttgatgagtcatcgtgtactttcatgccagaggggactgtgtgcagccaaaatgccttgtacccgatgagtcctctgctccaagaatgcctccgggggtacaccaagtcctgtgctcgtacactcgtatccgggtcttttgggaaccggttcattttatcacaagggaacctaatagccaattgtgcatcaatcctttgcaagtgttacacaacaggaacgatcattaatcaagaccctgacaagatcctaacatacattgctgccgatcactgcccggtagtcgaggtgaacggcgtgaccatccaagtcgggagcaggaggtatccagacgctgtgtacttgcacagaattgacctcggtcctcccatatcattggagaggttggacgtagggacaaatctggggaatgcaattgctaagttggaggatgccaaggaattgttggagtcatcggaccagatattgaggagtatgaaaggtttatcgagcactagcatagtctacatcctgattgcagtgtgtcttggagggttgatagggatccccgctttaatatgttgctgcagggggcgttgtaacaaaaagggagaacaagttggtatgtcaagaccaggcctaaagcctgatcttacgggaacatcaaaatcctatgtaaggtcgctctgatcctctacaactcttgaaacacaaatgtcccacaagtctcctcttcgtcatcaagcaaccaccgcacccagcatcaagcccacctgaaattatctccggcttccctctggccgaacaatatcggtagttaatcaaaacttagggtgcaagatcatccacaatgtcaccacaacgagaccggataaatgccttctacaaagataacccccatcccaagggaagtaggatagtcattaacagagaacatcttatgattgatagaccttatgttttgctggctgttctgtttgtcatgtttctgagcttgatcgggttgctagccattgcaggcattagacttcatcgggcagccatctacaccgcagagatccataaaagcctcagcaccaatctagatgtaactaactcaatcgagcatcaggtcaaggacgtgctgacaccactcttcaaaatcatcggtgatgaagtgggcctgaggacacctcagagattcactgacctagtgaaattaatctctgacaagatcaagttccttaatccggatagggagtacgacttcagagatctcacttggtgtatcaacccgccagagagaatcaaattggattatgatcaatactgtgcagatgtggctgctgaagagctcatgaatgcattggtgaactcaactctactggagaccagaacaaccaatcagttcctagctgtctcaaagggaaactgctcagggcccactacaatcagaggtcaattctcaaacatgtcgctgtccctgttagacttgtatttaggtcgaggttacaatgtgtcatctatagtcactatgacatcccagggaatgtatgggggaacttacctagtggaaaagcctaatctgagcagcaaaaggtcagagttgtcacaactgagcatgtaccgagtgtttgaagtaggtgttatcagaaatccgggtttgggggctccggtgttccatatgacaaactatcttgagcaaccagtcagtaatgatctcagcaactgtatggtggctttgggggagctcaaactcgcagccctttgtcacggggaagattctatcacaattccctatcagggatcagggaaaggtgtcagcttccagctcgtcaagctaggtgtctggaaatccccaaccgacatgcaatcctgggtccccttatcaacggatgatccagtgatagacaggctttacctctcatctcacagaggtgttatcgctgacaatcaagcaaaatgggctgtcccgacaacacgaacagatgacaagttgcgaatggagacatgcttccaacaggcgtgtaagggtaaaatccaagcactctgcgagaatcccgagtgggcaccattgaaggataacaggattccttcatacggggtcttgtctgttgatctgagtctgacagttgagcttaaaatcaaaattgcttcgggattcgggccattgatcacacacggttcagggatggacctatacaaatccaaccacaacaatgtgtattggctgactatcccgccaatgaagaacctagccttaggtgtaatcaacacattggagtggataccgagattcaaggttagtccctacctcttcactgtcccaattaaggaagcaggcgaagactgccatgccccaacatacctacctgcggaggtggatggtgatgtcaaactcagttccaatctggtgattctacctggtcaagatctccaatatgttttggcaacctacgatacttccagggttgaacatgctgtggtttattacgtttacagcccaagccgctcattttcttacttttatccttttaggttgcctataaagggggtccccatcgaattacaagtggaatgcttcacatgggaccaaaaactctggtgccgtcacttctgtgtgcttgcggactcagaatctggtggacatatcactcactctgggatggtgggcatgggagtcagctgcacagtcacccgggaagatggaaccaatcgcagatagggctgctagtgaaccaatcacatgatgtcacccagacatcaggcatacccactagtgtgaaatagacatcagaattaagaaaaacgtagggtccaagtggttccccgttatggactcgctatctgtcaaccagatcttataccctgaagttcacctagatagcccgatagttaccaataagatagtagccatcctggagtatgctcgagtccctcacgcttacagcctggaggaccctacactgtgtcagaacatcaagcaccgcctaaaaaacggattttccaaccaaatgattataaacaatgtggaagttgggaatgtcatcaagtccaagcttaggagttatccggcccactctcatattccatatccaaattgtaatcaggatttatttaacatagaagacaaagagtcaacgaggaagatccgtgaactcctcaaaaaggggaattcgctgtactccaaagtcagtgataaggttttccaatgcttaagggacactaactcacggcttggcctaggctccgaattgagggaggacatcaaggagaaagttattaacttgggagtttacatgcacagctcccagtggtttgagccctttctgttttggtttacagtcaagactgagatgaggtcagtgattaaatcacaaacccatacttgccataggaggagacacacacctgtattcttcactggtagttcagttgagttgctaatctctcgtgaccttgttgctataatcagtaaagagtctcaacatgtatattacctgacatttgaactggttttgatgtattgtgatgtcatagaggggaggttaatgacagagaccgctatgactattgatgctaggtatacagagcttctaggaagagtcagatacatgtggaaactgatagatggtttcttccctgcactcgggaatccaacttatcaaattgtagccatgctggagcctctttcacttgcttacctgcagctgagggatataacagtagaactcagaggtgctttccttaaccactgctttactgaaatacatgatgttcttgaccaaaacgggttttctgatgaaggtacttatcatgagttaactgaagctctagattacattttcataactgatgacatacatctgacaggggagattttctcatttttcagaagtttcggccaccccagacttgaagcagtaacggctgctgaaaatgttaggaaatacatgaatcagcctaaagtcattgtgtatgagactctgatgaaaggtcatgccatattttgtggaatcataatcaacggctatcgtgacaggcacggaggcagttggccaccgctgaccctccccctgcatgctgcagacacaatccggaatgctcaagcttcaggtgaagggttaacacatgagcagtgcgttgataactggaaatcttttgctggagtgaaatttggctgctttatgcctcttagcctggatagtgatctgacaatgtacctaaaggacaaggcacttgctgctctccaaagggaatgggattcagtttacccgaaagagttcctgcgttacgaccctcccaagggaaccgggtcacggaggcttgtagatgttttccttaatgattcgagctttgacccatatgatgtgataatgtatgttgtaagtggagcttacctccatgaccctgagttcaacctgtcttacagcctgaaagaaaaggagatcaaggaaacaggtagactttttgctaaaatgacttacaaaatgagggcatgccaagtgattgctgaaaatctaatctcaaacgggattggcaaatattttaaggacaatgggatggccaaggatgagcacgatttgactaaggcactccacactctagctgtctcaggagtccccaaagatctcaaagaaagtcacaggggggggccagtcttaaaaacctactcccgaagcccagtccacacaagtaccaggaacgtgagagcagcaaaagggtttatagggttccctcaagtaattcggcaggaccaagacactgatcatccggagaatatggaagcttacgagacagtcagtgcatttatcacgactgatctcaagaagtactgccttaattggagatatgagaccatcagcttgtttgcacagaggctaaatgagatttacggattgccctcatttttccagtggctgcataagaggcttgagacctctgtcctgtatgtaagtgaccctcattgcccccccgaccttgacgcccatatcccgttatataaagtccccaatgatcaaatcttcattaagtaccctatgggaggtatagaagggtattgtcagaagctgtggaccatcagcaccattccctatctatacctggctgcttatgagagcggagtaaggattgcttcgttagtgcaaggggacaatcagaccatagccgtaacaaaaagggtacccagcacatggccctacaaccttaagaaacgggaagctgctagagtaactagagattactttgtaattcttaggcaaaggctacatgatattggccatcacctcaaggcaaatgagacaattgtttcatcacatttttttgtctattcaaaaggaatatattatgatgggctacttgtgtcccaatcactcaagagcatcgcaagatgtgtattctggtcagagactatagttgatgaaacaagggcagcatgcagtaatattgctacaacaatggctaaaagcatcgagagaggttatgaccgttaccttgcatattccctgaacgtcctaaaagtgatacagcaaattctgatctctcttggcttcacaatcaattcaaccatgacccgggatgtagtcatacccctcctcacaaacaacgacctcttaataaggatggcactgttgcccgctcctattggggggatgaattatctgaatatgagcaggctgtttgtcagaaacatcggtgatccagtaacatcatcaattgctgatctcaagagaatgattctcgcctcactaatgcctgaagagaccctccatcaagtaatgacacaacaaccgggggactcttcattcctagactgggctagcgacccttactcagcaaatcttgtatgtgtccagagcatcactagactcctcaagaacataactgcaaggtttgtcctgatccatagtccaaacccaatgttaaaaggattattccatgatgacagtaaagaagaggacgagggactggcggcattcctcatggacaggcatattatagtacctagggcagctcatgaaatcctggatcatagtgtcacaggggcaagagagtctattgcaggcatgctggataccacaaaaggcttgattcgagccagcatgaggaagggggggttaacctctcgagtgataaccagattgtccaattatgactatgaacaattcagagcagggatggtgctattgacaggaagaaagagaaatgtcctcattgacaaagagtcatgttcagtgcagctggcgagagctctaagaagccatatgtgggcgaggctagctcgaggacggcctatttacggccttgaggtccctgatgtactagaatctatgcgaggccaccttattcggcgtcatgagacatgtgtcatctgcgagtgtggatcagtcaactacggatggttttttgtcccctcgggttgccaactggatgatattgacaaggaaacatcatccttgagagtcccatatattggttctaccactgatgagagaacagacatgaagcttgccttcgtaagagccccaagtcgatccttgcgatctgctgttagaatagcaacagtgtactcatgggcttacggtgatgatgatagctcttggaacgaagcctggttgttggctaggcaaagggccaatgtgagcctggaggagctaagggtgatcactcccatctcaacttcgactaatttagcgcataggttgagggatcgtagcactcaagtgaaatactcaggtacatcccttgtccgagtggcgaggtataccacaatctccaacgacaatctctcatttgtcatatcagataagaaggttgatactaactttatataccaacaaggaatgcttctagggttgggtgttttagaaacattgtttcgactcgagaaagataccggatcatctaacacggtattacatcttcacgtcgaaacagattgttgcgtgatcccgatgatagatcatcccaggatacccagctcccgcaagctagagctgagggcagagctatgtaccaacccattgatatatgataatgcacctttaattgacagagatgcaacaaggctatacacccagagccataggaggcaccttgtggaatttgttacatggtccacaccccaactatatcacattttagctaagtccacagcactatctatgattgacctggtaacaaaatttgagaaggaccatatgaatgaaatttcagctctcataggggatgacgatatcaatagtttcataactgagtttctgctcatagagccaagattattcactatctacttgggccagtgtgcggccatcaattgggcatttgatgtacattatcatagaccatcagggaaatatcagatgggtgagctgttgtcatcgttcctttctagaatgagcaaaggagtgtttaaggtgcttgtcaatgctctaagccacccaaagatctacaagaaattctggcattgtggtattatagagcctatccatggtccttcacttgatgctcaaaacttgcacacaactgtgtgcaacatggtttacacatgctatatgacctacctcgacctgttgttgaatgaagagttagaagagttcacatttctcttgtgtgaaagcgacgaggatgtagtaccggacagattcgacaacatccaggcaaaacacttatgtgttctggcagatttgtactgtcaaccagggacctgcccaccaattcgaggtctaagaccggtagagaaatgtgcagttctaaccgaccatatcaaggcagaggctatgttatctccagcaggatcttcgtggaacataaatccaattattgtagaccattactcatgctctctgacttatctccggcgaggatcgatcaaacagataagattgagagttgatccaggattcattttcgacgccctcgctgaggtaaatgtcagtcagccaaagatcggcagcaacaacatctcaaatatgagcatcaaggctttcagacccccacacgatgatgttgcaaaattgctcaaagatatcaacacaagcaagcacaatcttcccatttcagggggcaatctcgccaattatgaaatccatgctttccgcagaatcgggttgaactcatctgcttgctacaaagctgttgagatatcaacattaattaggagatgccttgagccaggggaggacggcttgttcttgggtgagggatcgggttctatgttgatcacttataaagagatacttaaactaaacaagtgcttctataatagtggggtttccgccaattctagatctggtcaaagggaattagcaccctatccctccgaagttggccttgtcgaacacagaatgggagtaggtaatattgtcaaagtgctctttaacgggaggcccgaagtcacgtgggtaggcagtgtagattgcttcaatttcatagttagtaatatccctacctctagtgtggggtttatccattcagatatagagaccttgcctgacaaagatactatagagaagctagaggaattggcagccatcttatcgatggctctgctcctgggcaaaataggatcaatactggtgattaagcttatgcctttcagcggggattttgttcagggatttataagttatgtagggtctcattatagagaagtgaaccttgtataccctagatacagcaacttcatctctactgaatcttatttggttatgacagatctcaaggctaaccggctaatgaatcctgaaaagattaagcagcagataattgaatcatctgtgaggacttcacctggacttataggtcacatcctatccattaagcaactaagctgcatacaagcaattgtgggagacgcagttagtagaggtgatatcaatcctactctgaaaaaacttacacctatagagcaggtgctgatcaattgcgggttggcaattaacggacctaagctgtgcaaagaattgatccaccatgatgttgcctcagggcaagatggattgcttaattctatactcatcctctacagggagttggcaagattcaaagacaaccaaagaagtcaacaagggatgttccacgcttaccccgtattggtaagtagcaggcaacgagaacttatatctaggatcacccgcaaattctgggggcacattcttctttactccgggaacaaaaagttgataaataagtttatccagaatctcaagtccggctatctgatactagacttacaccagaatatcttcgttaagaatctatccaagtcagagaaacagattattatgacggggggtttgaaacgtgagtgggtttttaaggtaacagtcaaggagaccaaagaatggtataagttagtcggatacagtgccctgattaaggactaattggttgaactccggaaccctaatcctgccctaggtggttaggcattatttgcaatatattaaagaaaactttgaaaatacgaagtttctattcccagctttgtctggtggccggcatggtcccagcctcctcgctggcgccggctgggcaacattccgaggggaccgtcccctcggtaatggcgaatgggacgcggccggtcgatcgacgatccggctgctaacaaagcccgaaaggaagctgagttggctgctgccaccgctgagcaataactagcataaccccttggggcctctaaacgggtcttgaggggttttttgctgaaaggaggaactatatccggatcgagatcaattctgtgagcgtatggcaaacgaaggaaaaatagttatagtagccgcactcgatgggacatttcaacgtaaaccgtttaataatattttgaatcttattccattatctgaaatggtggtaaaactaactgctgtgtgtatgaaatgctttaaggaggcttccttttctaaacgattgggtgaggaaaccgagatagaaataataggaggtaatgatatgtatcaatcggtgtgtagaaagtgttacatcgactcataatattatattttttatctaaaaaactaaaaataaacattgattaaattttaatataatacttaaaaatggatgttgtgtcgttagataaaccgtttatgtattttgaggaaattgataatgagttagattacgaaccagaaagtgcaaatgaggtcgcaaaaaaactgccgtatcaaggacagttaaaactattactaggagaattattttttcttagtaagttacagcgacacggtatattagatggtgccaccgtagtgtatataggatctgctcccggtacacatatacgttatttgagagatcatttctataatttaggagtgatcccgaaaggaagctgagttggctgctgccaccgctgagcaataactagcataaccccttggggcctctaaacgggtcttgaggggttttttgctgaaaggaggaacgcgcctgatgcggtattttctccttacgcatctgtgcggtatttcacaccgcatatatggtgcactctcagtacaatctgctctgatgccgcatagttaagccagccccgacacccgccaacacccgctgacgcgccctgacgggcttgtctgctcccggcatccgcttacagacaagctgtgaccgtctccgggagctgcatgtgtcagaggttttcaccgtcatcaccgaaacgcgcgagacgaaagggcctcgtgatacgcctatttttataggttaatgtcatgataataatggtttcttagacgtcaggtggcacttttcggggaaatgtgcgcggaacccctatttgtttatttttctaaatacattcaaatatgtatccgctcatgagacaataaccctgataaatgcttcaataatattgaaaaaggaagagtatgagtattcaacatttccgtgtcgcccttattcccttttttgcggcattttgccttcctgtttttgctcacccagaaacgctggtgaaagtaaaagatgctgaagatcagttgggtgcacgagtgggttacatcgaactggatctcaacagcggtaagatccttgagagttttcgccccgaagaacgttttccaatgatgagcacttttaaagttctgctatgtggcgcggtattatcccgtattgacgccgggcaagagcaactcggtcgccgcatacactattctcagaatgacttggttgagtactcaccagtcacagaaaagcatcttacggatggcatgacagtaagagaattatgcagtgctgccataaccatgagtgataacactgcggccaacttacttctgacaacgatcggaggaccgaaggagctaaccgcttttttgcacaacatgggggatcatgtaactcgccttgatcgttgggaaccggagctgaatgaagccataccaaacgacgagcgtgacaccacgatgcctgtagcaatggcaacaacgttgcgcaaactattaactggcgaactacttactctagcttcccggcaacaattaatagactggatggaggcggataaagttgcaggaccacttctgcgctcggcccttccggctggctggtttattgctgataaatctggagccggtgagcgtgggtctcgcggtatcattgcagcactggggccagatggtaagccctcccgtatcgtagttatctacacgacggggagtcaggcaactatggatgaacgaaatagacagatcgctgagataggtgcctcactgattaagcattggtaactgtcagaccaagtttactcatatatactttagattgatttaaaacttcatttttaatttaaaaggatctaggtgaagatcctttttgataatctcatgaccaaaatcccttaacgtgagttttcgttccactgagcgtcagaccccgtagaaaagatcaaaggatcttcttgagatcctttttttctgcgcgtaatctgctgcttgcaaacaaaaaaaccaccgctaccagcggtggtttgtttgccggatcaagagctaccaactctttttccgaaggtaactggcttcagcagagcgcagataccaaatactgtccttctagtgtagccgtagttaggccaccacttcaagaactctgtagcaccgcctacatacctcgctctgctaatcctgttaccagtggctgctgccagtggcgataagtcgtgtcttaccgggttggactcaagacgatagttaccggataaggcgcagcggtcgggctgaacggggggttcgtgcacacagcccagcttggagcgaacgacctacaccgaactgagatacctacagcgtgagcattgagaaagcgccacgcttcccgaagggagaaaggcggacaggtatccggtaagcggcagggtcggaacaggagagcgcacgagggagcttccagggggaaacgcctggtatctttatagtcctgtcgggtttcgccacctctgacttgagcgtcgatttttgtgatgctcgtcaggggggcggagcctatggaaaaacgccagcaacgcggcctttttacggttcctggccttttgctggccttttgctcacatgttctttcctgcgttatcccctgattctgtggataaccgtattaccgcctttgagtgagctgataccgctcgccgcagccgaacgaccgagcgcagcgagtcagtgagcgaggaagcggaagagcgcccaatacgcaaaccgcctctccccgcgcgttggccgattcattaatgcagctggcacgacaggtttcccgactggaaagcgggcagtgagcgcaacgcaattaatgtgagttagctcactcattaggcaccccaggctttacactttatgcttccggctcgtatgttgtgtggaattgtgagcggataacaatttcacacaggaaacagctatgaccatgattacgccaagcttacgcgtcctggcattatgcccagtacatgaccttatgggactttcctacttggcagtacatctacgtattagtcatcgctattaccatggtgatgcggttttggcagtacatcaatgggcgtggatagcggtttgactcacggggatttccaagtctccaccccattgacgtcaatgggagtttgttttggcaccaaaatcaacgggactttccaaaatgtcgtaacaactccgccccattgacgcaaatgggcggtaggcgtgtacggtgggaggtctatataagcagagctcgtttagtgaaccgtgg

SEQ ID NO: 40 - DNA, 21648 bp, Artificial Sequence
  Vector with soluble s4-1BBL ectodomain construct
accaaacaaagttgggtaaggatagttcaatcaatgatcatcttctagtgcacttaggattcaagatcctattatcagggacaagagcaggattagggatatctcgaggcgcgtgccaccatgcccatggggtctctgcaaccgctggccaccttgtacctgctggggatgctggtcgcttcctgcctcggatctggtgctggaggatcaggtggttctagtggaagtgatggtgctagcgggtctggcgttcgactttgggctacaagacaggcaatgctgggccaggtccatgaggttcctgaggggtggctcattttcgtggccgagcaggaggagctgtatgttcgcgtgcaaaacggctttaggaaggtccagctggaagcgcggacacctttgcccaggggaaccgataacgagggctcacttgatcttcgacaagggatgtttgcacagctcgtagcacaaaacgttctgctcatcgacggccccttgtcctggtactcagacccaggattggccggtgtcagtcttaccggcggactcagctacaaggaggacactaaagagttggtcgtggcaaaggcaggcgtgtattatgtgttcttccaactggaactgaggagggttgtggccggtgaaggcagcggttccgtcagtttggcgctgcacctgcagcctttgaggagtgccgcaggtgctgctgcattggctctgactgtcgacctgccacctgcctcatccgaggctagaaattctgcctttggatttcaaggcagactgttgcatctgtcagcagggcagagacttggggtgcacctccatactgaggcaagagctagacacgcttggcagctcacccaaggggccactgttcttggactcttccgggtgacaccagagatacccgcaggactcccaagtccaaggagtgaaggcggtggcggaagcggtggaggtggatctggcggaggtggaagtcttgacctgcggcagggcatgttcgctcaattggtggcccagaatgttcttctgatcgatggtcctctgtcttggtattctgatcctggcttggcaggggtgtcacttactggtggtctttcatataaagaagacacaaaggagctcgtggtggctaaagctggagtttattacgtgttttttcaattggaactccggagagtggttgccggcgaaggttccggttctgtttctcttgctctgcacttgcaaccactgagaagtgctgcaggcgcagctgctttggctttgaccgtggatttgcctcctgcttcttccgaagccagaaacagcgcttttggctttcaaggaaggctcctgcatctctctgccggccaacgactgggagtgcatttgcacactgaagcacgcgcaagacatgcatggcagcttactcaaggagctacggtgctcggattgtttcgggtcacccctgagatacctgctgggctgcctagtcctagatcagaaggaggtggtggctctggtggaggaggttctggagggggaggaagcctggatctgcgacaaggcatgtttgcccagctcgttgcacaaaatgtgctgctgatcgacggacctctctcctggtattccgatcccgggttggctggagttagtctcacgggaggactgtcctacaaagaagatacgaaggaactcgtggtcgcaaaagctggggtttactacgtttttttccaacttgagctgcggagagttgtcgccggagaagggagcggatctgtatcattggcacttcaccttcagccgctcagatctgctgcaggtgccgctgcacttgctttgactgtggatctgcctccagcctcttctgaagcccgcaactctgcgtttggattccaagggagactgctccacctcagtgctggccaaagacttggagtccatctgcacacagaagcgagagccagacatgcctggcagctcactcagggggctactgtcctcggactgtttagagtcactccagaaataccagccggcctgccttcacctcgaagcgaataaacgcgccatccatcattgttataaaaaacttaggattcaagatcctattatcagggacaagagcaggattagggatatccgagatggccacacttttaaggagcttagcattgttcaaaagaaacaaggacaaaccacccattacatcaggatccggtggagccatcagaggaatcaaacacattattatagtaccaatccctggagattcctcaattaccactcgatccagacttctggaccggttggtgaggttaattggaaacccggatgtgagcgggcccaaactaacaggggcactaataggtatattatccttatttgtggagtctccaggtcaattgattcagaggatcaccgatgaccctgacgttagcataaggctgttagaggttgtccagagtgaccagtcacaatctggccttaccttcgcatcaagaggtaccaacatggaggatgaggcggaccaatacttttcacatgatgatccaattagtagtgatcaatccaggttcggatggttcgggaacaaggaaatctcagatattgaagtgcaagaccctgagggattcaacatgattctgggtaccatcctagcccaaatttgggtcttgctcgcaaaggcggttacggccccagacacggcagctgattcggagctaagaaggtggataaagtacacccaacaaagaagggtagttggtgaatttagattggagagaaaatggttggatgtggtgaggaacaggattgccgaggacctctccttacgccgattcatggtcgctctaatcctggatatcaagagaacacccggaaacaaacccaggattgctgaaatgatatgtgacattgatacatatatcgtagaggcaggattagccagttttatcctgactattaagtttgggatagaaactatgtatcctgctcttggactgcatgaatttgctggtgagttatccacacttgagtccttgatgaacctttaccagcaaatgggggaaactgcaccctacatggtaatcctggagaactcaattcagaacaagttcagtgcaggatcataccctctgctctggagctatgccatgggagtaggagtggaacttgaaaactccatgggaggtttgaactttggccgatcttactttgatccagcatattttagattagggcaagagatggtaaggaggtcagctggaaaggtcagttccacattggcatctgaactcggtatcactgccgaggatgcaaggcttgtttcagagattgcaatgcatactactgaggacaagatcagtagagcggttggacccagacaagcccaagtatcatttctacacggtgatcaaagtgagaatgagctaccgagattggggggcaaggaagataggagggtcaaacagagtcgaggagaagccagggagagctacagagaaaccgggcccagcagagcaagtgatgcgagagctgcccatcttccaaccggcacacccctagacattgacactgcaacggagtccagccaagatccgcaggacagtcgaaggtcagctgacgccctgcttaggctgcaagccatggcaggaatctcggaagaacaaggctcagacacggacacccctatagtgtacaatgacagaaatcttctagactaggtgcgagaggccgagggccagaacaacatccgcctaccatccatcattgttataaaaaacttaggaaccaggtccacacagccgccagcccatcaaccatccactcccacgattggagccaatggcagaagagcaggcacgccatgtcaaaaacggactggaatgcatccgggctctcaaggccgagcccatcggctcactggccatcgaggaagctatggcagcatggtcagaaatatcagacaacccaggacaggagcgagccacctgcagggaagagaaggcaggcagttcgggtctcagcaaaccatgcctctcagcaattggatcaactgaaggcggtgcacctcgcatccgcggtcagggacctggagagagcgatgacgacgctgaaactttgggaatccccccaagaaatctccaggcatcaagcactgggttacagtgttattacgtttatgatcacagcggtgaagcggttaagggaatccaagatgctgactctatcatggttcaatcaggccttgatggtgatagcaccctctcaggaggagacaatgaatctgaaaacagcgatgtggatattggcgaacctgataccgagggatatgctatcactgaccggggatctgctcccatctctatggggttcagggcttctgatgttgaaactgcagaaggaggggagatccacgagctcctgagactccaatccagaggcaacaactttccgaagcttgggaaaactctcaatgttcctccgcccccggaccccggtagggccagcacttccgggacacccattaaaaagggcacagacgcgagattagcctcatttggaacggagatcgcgtctttattgacaggtggtgcaacccaatgtgctcgaaagtcaccctcggaaccatcagggccaggtgcacctgcggggaatgtccccgagtgtgtgagcaatgccgcactgatacaggagtggacacccgaatctggtaccacaatctccccgagatcccagaataatgaagaagggggagactattatgatgatgagctgttctctgatgtccaagatattaaaacagccttggccaaaatacacgaggataatcagaagataatctccaagctagaatcactgctgttattgaagggagaagttgagtcaattaagaagcagatcaacaggcaaaatatcagcatatccaccctggaaggacacctctcaagcatcatgatcgccattcctggacttgggaaggatcccaacgaccccactgcagatgtcgaaatcaatcccgacttgaaacccatcataggcagagattcaggccgagcactggccgaagttctcaagaaacccgttgccagccgacaactccaaggaatgacaaatggacggaccagttccagaggacagctgctgaaggaatttcagctaaagccgatcgggaaaaagatgagctcagccgtcgggtttgttcctgacaccggccctgcatcacgcagtgtaatccgctccattataaaatccagccggctagaggaggatcggaagcgttacctgatgactctccttgatgatatcaaaggagccaatgatcttgccaagttccaccagatgctgatgaagataataatgaagtagctacagctcaacttacctgccaaccccatgccagtcgacccaactagtacaacctaaatccattataaaaaacttaggagcaaagtgattgcctcccaaggtccacaatgacagagacctacgacttcgacaagtcggcatgggacatcaaagggtcgatcgctccgatacaacccaccacctacagtgatggcaggctggtgccccaggtcagagtcatagatcctggtctaggcgacaggaaggatgaatgctttatgtacatgtttctgctgggggttgttgaggacagcgattccctagggcctccaatcgggcgagcatttgggttcctgcccttaggtgttggcagatccacagcaaagcccgaaaaactcctcaaagaggccactgagcttgacatagttgttagacgtacagcagggctcaatgaaaaactggtgttctacaacaacaccccactaactctcctcacaccttggagaaaggtcctaacaacagggagtgtcttcaacgcaaaccaagtgtgcaatgcggttaatctgataccgctcgataccccgcagaggttccgtgttgtttatatgagcatcacccgtctttcggataacgggtattacaccgttcctagaagaatgctggaattcagatcggtcaatgcagtggccttcaacctgctggtgacccttaggattgacaaggcgataggccctgggaagatcatcgacaatacagagcaacttcctgaggcaacatttatggtccacatcgggaacttcaggagaaagaagagtgaagtctactctgccgattattgcaaaatgaaaatcgaaaagatgggcctggtttttgcacttggtgggatagggggcaccagtcttcacattagaagcacaggcaaaatgagcaagactctccatgcacaactcgggttcaagaagaccttatgttacccgctgatggatatcaatgaagaccttaatcgattactctggaggagcagatgcaagatagtaagaatccaggcagttttgcagccatcagttcctcaagaattccgcatttacgacgacgtgatcataaatgatgaccaaggactattcaaagttctgtagaccgtagtgcccagcaatgcccgaaaacgacccccctcacaatgacagccagaaggcccggacaaaaaagccccctccgaaagactccacggaccaagcgagaggccagccagcagccgacggcaagcgcgaacaccaggcggccccagcacagaacagccctgacacaaggccaccaccagccaccccaatctgcatcctcctcgtgggacccccgaggaccaacccccaaggctgcccccgatccaaaccaccaaccgcatccccaccacccccgggaaagaaacccccagcaattggaaggcccctccccctcttcctcaacacaagaactccacaaccgaaccgcacaagcgaccgaggtgacccaaccgcaggcatccgactccctagacagatcctctctccccggcaaactaaacaaaacttagggccaaggaacatacacacccaacagaacccagaccccggcccacggcgccgcgcccccaacccccgacaaccagagggagcccccaaccaatcccgccggctcccccggtgcccacaggcagggacaccaacccccgaacagacccagcacccaaccatcgacaatccaagacgggggggcccccccaaaaaaaggcccccaggggccgacagccagcaccgcgaggaagcccacccaccccacacacgaccacggcaaccaaaccagaacccagaccaccctgggccaccagctcccagactcggccatcaccccgcagaaaggaaaggccacaacccgcgcaccccagccccgatccggcggggagccacccaacccgaaccagcacccaagagcgatccccgaaggacccccgaaccgcaaaggacatcagtatcccacagcctctccaagtcccccggtctcctcctcttctcgaagggaccaaaagatcaatccaccacacccgacgacactcaactccccacccctaaaggagacaccgggaatcccagaatcaagactcatccaatgtccatcatgggtctcaaggtgaacgtctctgccatattcatggcagtactgttaactctccaaacacccaccggtcaaatccattggggcaatctctctaagataggggtggtaggaataggaagtgcaagctacaaagttatgactcgttccagccatcaatcattagtcataaaattaatgcccaatataactctcctcaataactgcacgagggtagagattgcagaatacaggagactactgagaacagttttggaaccaattagagatgcacttaatgcaatgacccagaatataagaccggttcagagtgtagcttcaagtaggagacacaagagatttgcgggagtagtcctggcaggtgcggccctaggcgttgccacagctgctcagataacagccggcattgcacttcaccagtccatgctgaactctcaagccatcgacaatctgagagcgagcctggaaactactaatcaggcaattgagacaatcagacaagcagggcaggagatgatattggctgttcagggtgtccaagactacatcaataatgagctgataccgtctatgaaccaactatcttgtgatttaatcggccagaagctcgggctcaaattgctcagatactatacagaaatcctgtcattatttggccccagtttacgggaccccatatctgcggagatatctatccaggctttgagctatgcgcttggaggagacatcaataaggtgttagaaaagctcggatacagtggaggtgatttactgggcatcttagagagcggaggcatcaaggcccggataactcacgtcgacacagagtcctacttcattgtcctcagtatagcctatccgacgctgtccgagattaagggggtgattgtccaccggctagagggggtctcgtacaacataggctctcaagagtggtataccactgtgcccaagtatgttgcaacccaagggtaccttatctcgaattttgatgagtcatcgtgtactttcatgccagaggggactgtgtgcagccaaaatgccttgtacccgatgagtcctctgctccaagaatgcctccgggggtacaccaagtcctgtgctcgtacactcgtatccgggtcttttgggaaccggttcattttatcacaagggaacctaatagccaattgtgcatcaatcctttgcaagtgttacacaacaggaacgatcattaatcaagaccctgacaagatcctaacatacattgctgccgatcactgcccggtagtcgaggtgaacggcgtgaccatccaagtcgggagcaggaggtatccagacgctgtgtacttgcacagaattgacctcggtcctcccatatcattggagaggttggacgtagggacaaatctggggaatgcaattgctaagttggaggatgccaaggaattgttggagtcatcggaccagatattgaggagtatgaaaggtttatcgagcactagcatagtctacatcctgattgcagtgtgtcttggagggttgatagggatccccgctttaatatgttgctgcagggggcgttgtaacaaaaagggagaacaagttggtatgtcaagaccaggcctaaagcctgatcttacgggaacatcaaaatcctatgtaaggtcgctctgatcctctacaactcttgaaacacaaatgtcccacaagtctcctcttcgtcatcaagcaaccaccgcacccagcatcaagcccacctgaaattatctccggcttccctctggccgaacaatatcggtagttaatcaaaacttagggtgcaagatcatccacaatgtcaccacaacgagaccggataaatgccttctacaaagataacccccatcccaagggaagtaggatagtcattaacagagaacatcttatgattgatagaccttatgttttgctggctgttctgtttgtcatgtttctgagcttgatcgggttgctagccattgcaggcattagacttcatcgggcagccatctacaccgcagagatccataaaagcctcagcaccaatctagatgtaactaactcaatcgagcatcaggtcaaggacgtgctgacaccactcttcaaaatcatcggtgatgaagtgggcctgaggacacctcagagattcactgacctagtgaaattaatctctgacaagatcaagttccttaatccggatagggagtacgacttcagagatctcacttggtgtatcaacccgccagagagaatcaaattggattatgatcaatactgtgcagatgtggctgctgaagagctcatgaatgcattggtgaactcaactctactggagaccagaacaaccaatcagttcctagctgtctcaaagggaaactgctcagggcccactacaatcagaggtcaattctcaaacatgtcgctgtccctgttagacttgtatttaggtcgaggttacaatgtgtcatctatagtcactatgacatcccagggaatgtatgggggaacttacctagtggaaaagcctaatctgagcagcaaaaggtcagagttgtcacaactgagcatgtaccgagtgtttgaagtaggtgttatcagaaatccgggtttgggggctccggtgttccatatgacaaactatcttgagcaaccagtcagtaatgatctcagcaactgtatggtggctttgggggagctcaaactcgcagccctttgtcacggggaagattctatcacaattccctatcagggatcagggaaaggtgtcagcttccagctcgtcaagctaggtgtctggaaatccccaaccgacatgcaatcctgggtccccttatcaacggatgatccagtgatagacaggctttacctctcatctcacagaggtgttatcgctgacaatcaagcaaaatgggctgtcccgacaacacgaacagatgacaagttgcgaatggagacatgcttccaacaggcgtgtaagggtaaaatccaagcactctgcgagaatcccgagtgggcaccattgaaggataacaggattccttcatacggggtcttgtctgttgatctgagtctgacagttgagcttaaaatcaaaattgcttcgggattcgggccattgatcacacacggttcagggatggacctatacaaatccaaccacaacaatgtgtattggctgactatcccgccaatgaagaacctagccttaggtgtaatcaacacattggagtggataccgagattcaaggttagtccctacctcttcactgtcccaattaaggaagcaggcgaagactgccatgccccaacatacctacctgcggaggtggatggtgatgtcaaactcagttccaatctggtgattctacctggtcaagatctccaatatgttttggcaacctacgatacttccagggttgaacatgctgtggtttattacgtttacagcccaagccgctcattttcttacttttatccttttaggttgcctataaagggggtccccatcgaattacaagtggaatgcttcacatgggaccaaaaactctggtgccgtcacttctgtgtgcttgcggactcagaatctggtggacatatcactcactctgggatggtgggcatgggagtcagctgcacagtcacccgggaagatggaaccaatcgcagatagggctgctagtgaaccaatcacatgatgtcacccagacatcaggcatacccactagtgtgaaatagacatcagaattaagaaaaacgtagggtccaagtggttccccgttatggactcgctatctgtcaaccagatcttataccctgaagttcacctagatagcccgatagttaccaataagatagtagccatcctggagtatgctcgagtccctcacgcttacagcctggaggaccctacactgtgtcagaacatcaagcaccgcctaaaaaacggattttccaaccaaatgattataaacaatgtggaagttgggaatgtcatcaagtccaagcttaggagttatccggcccactctcatattccatatccaaattgtaatcaggatttatttaacatagaagacaaagagtcaacgaggaagatccgtgaactcctcaaaaaggggaattcgctgtactccaaagtcagtgataaggttttccaatgcttaagggacactaactcacggcttggcctaggctccgaattgagggaggacatcaaggagaaagttattaacttgggagtttacatgcacagctcccagtggtttgagccctttctgttttggtttacagtcaagactgagatgaggtcagtgattaaatcacaaacccatacttgccataggaggagacacacacctgtattcttcactggtagttcagttgagttgctaatctctcgtgaccttgttgctataatcagtaaagagtctcaacatgtatattacctgacatttgaactggttttgatgtattgtgatgtcatagaggggaggttaatgacagagaccgctatgactattgatgctaggtatacagagcttctaggaagagtcagatacatgtggaaactgatagatggtttcttccctgcactcgggaatccaacttatcaaattgtagccatgctggagcctctttcacttgcttacctgcagctgagggatataacagtagaactcagaggtgctttccttaaccactgctttactgaaatacatgatgttcttgaccaaaacgggttttctgatgaaggtacttatcatgagttaactgaagctctagattacattttcataactgatgacatacatctgacaggggagattttctcatttttcagaagtttcggccaccccagacttgaagcagtaacggctgctgaaaatgttaggaaatacatgaatcagcctaaagtcattgtgtatgagactctgatgaaaggtcatgccatattttgtggaatcataatcaacggctatcgtgacaggcacggaggcagttggccaccgctgaccctccccctgcatgctgcagacacaatccggaatgctcaagcttcaggtgaagggttaacacatgagcagtgcgttgataactggaaatcttttgctggagtgaaatttggctgctttatgcctcttagcctggatagtgatctgacaatgtacctaaaggacaaggcacttgctgctctccaaagggaatgggattcagtttacccgaaagagttcctgcgttacgaccctcccaagggaaccgggtcacggaggcttgtagatgttttccttaatgattcgagctttgacccatatgatgtgataatgtatgttgtaagtggagcttacctccatgaccctgagttcaacctgtcttacagcctgaaagaaaaggagatcaaggaaacaggtagactttttgctaaaatgacttacaaaatgagggcatgccaagtgattgctgaaaatctaatctcaaacgggattggcaaatattttaaggacaatgggatggccaaggatgagcacgatttgactaaggcactccacactctagctgtctcaggagtccccaaagatctcaaagaaagtcacaggggggggccagtcttaaaaacctactcccgaagcccagtccacacaagtaccaggaacgtgagagcagcaaaagggtttatagggttccctcaagtaattcggcaggaccaagacactgatcatccggagaatatggaagcttacgagacagtcagtgcatttatcacgactgatctcaagaagtactgccttaattggagatatgagaccatcagcttgtttgcacagaggctaaatgagatttacggattgccctcatttttccagtggctgcataagaggcttgagacctctgtcctgtatgtaagtgaccctcattgcccccccgaccttgacgcccatatcccgttatataaagtccccaatgatcaaatcttcattaagtaccctatgggaggtatagaagggtattgtcagaagctgtggaccatcagcaccattccctatctatacctggctgcttatgagagcggagtaaggattgcttcgttagtgcaaggggacaatcagaccatagccgtaacaaaaagggtacccagcacatggccctacaaccttaagaaacgggaagctgctagagtaactagagattactttgtaattcttaggcaaaggctacatgatattggccatcacctcaaggcaaatgagacaattgtttcatcacatttttttgtctattcaaaaggaatatattatgatgggctacttgtgtcccaatcactcaagagcatcgcaagatgtgtattctggtcagagactatagttgatgaaacaagggcagcatgcagtaatattgctacaacaatggctaaaagcatcgagagaggttatgaccgttaccttgcatattccctgaacgtcctaaaagtgatacagcaaattctgatctctcttggcttcacaatcaattcaaccatgacccgggatgtagtcatacccctcctcacaaacaacgacctcttaataaggatggcactgttgcccgctcctattggggggatgaattatctgaatatgagcaggctgtttgtcagaaacatcggtgatccagtaacatcatcaattgctgatctcaagagaatgattctcgcctcactaatgcctgaagagaccctccatcaagtaatgacacaacaaccgggggactcttcattcctagactgggctagcgacccttactcagcaaatcttgtatgtgtccagagcatcactagactcctcaagaacataactgcaaggtttgtcctgatccatagtccaaacccaatgttaaaaggattattccatgatgacagtaaagaagaggacgagggactggcggcattcctcatggacaggcatattatagtacctagggcagctcatgaaatcctggatcatagtgtcacaggggcaagagagtctattgcaggcatgctggataccacaaaaggcttgattcgagccagcatgaggaagggggggttaacctctcgagtgataaccagattgtccaattatgactatgaacaattcagagcagggatggtgctattgacaggaagaaagagaaatgtcctcattgacaaagagtcatgttcagtgcagctggcgagagctctaagaagccatatgtgggcgaggctagctcgaggacggcctatttacggccttgaggtccctgatgtactagaatctatgcgaggccaccttattcggcgtcatgagacatgtgtcatctgcgagtgtggatcagtcaactacggatggttttttgtcccctcgggttgccaactggatgatattgacaaggaaacatcatccttgagagtcccatatattggttctaccactgatgagagaacagacatgaagcttgccttcgtaagagccccaagtcgatccttgcgatctgctgttagaatagcaacagtgtactcatgggcttacggtgatgatgatagctcttggaacgaagcctggttgttggctaggcaaagggccaatgtgagcctggaggagctaagggtgatcactcccatctcaacttcgactaatttagcgcataggttgagggatcgtagcactcaagtgaaatactcaggtacatcccttgtccgagtggcgaggtataccacaatctccaacgacaatctctcatttgtcatatcagataagaaggttgatactaactttatataccaacaaggaatgcttctagggttgggtgttttagaaacattgtttcgactcgagaaagataccggatcatctaacacggtattacatcttcacgtcgaaacagattgttgcgtgatcccgatgatagatcatcccaggatacccagctcccgcaagctagagctgagggcagagctatgtaccaacccattgatatatgataatgcacctttaattgacagagatgcaacaaggctatacacccagagccataggaggcaccttgtggaatttgttacatggtccacaccccaactatatcacattttagctaagtccacagcactatctatgattgacctggtaacaaaatttgagaaggaccatatgaatgaaatttcagctctcataggggatgacgatatcaatagtttcataactgagtttctgctcatagagccaagattattcactatctacttgggccagtgtgcggccatcaattgggcatttgatgtacattatcatagaccatcagggaaatatcagatgggtgagctgttgtcatcgttcctttctagaatgagcaaaggagtgtttaaggtgcttgtcaatgctctaagccacccaaagatctacaagaaattctggcattgtggtattatagagcctatccatggtccttcacttgatgctcaaaacttgcacacaactgtgtgcaacatggtttacacatgctatatgacctacctcgacctgttgttgaatgaagagttagaagagttcacatttctcttgtgtgaaagcgacgaggatgtagtaccggacagattcgacaacatccaggcaaaacacttatgtgttctggcagatttgtactgtcaaccagggacctgcccaccaattcgaggtctaagaccggtagagaaatgtgcagttctaaccgaccatatcaaggcagaggctatgttatctccagcaggatcttcgtggaacataaatccaattattgtagaccattactcatgctctctgacttatctccggcgaggatcgatcaaacagataagattgagagttgatccaggattcattttcgacgccctcgctgaggtaaatgtcagtcagccaaagatcggcagcaacaacatctcaaatatgagcatcaaggctttcagacccccacacgatgatgttgcaaaattgctcaaagatatcaacacaagcaagcacaatcttcccatttcagggggcaatctcgccaattatgaaatccatgctttccgcagaatcgggttgaactcatctgcttgctacaaagctgttgagatatcaacattaattaggagatgccttgagccaggggaggacggcttgttcttgggtgagggatcgggttctatgttgatcacttataaagagatacttaaactaaacaagtgcttctataatagtggggtttccgccaattctagatctggtcaaagggaattagcaccctatccctccgaagttggccttgtcgaacacagaatgggagtaggtaatattgtcaaagtgctctttaacgggaggcccgaagtcacgtgggtaggcagtgtagattgcttcaatttcatagttagtaatatccctacctctagtgtggggtttatccattcagatatagagaccttgcctgacaaagatactatagagaagctagaggaattggcagccatcttatcgatggctctgctcctgggcaaaataggatcaatactggtgattaagcttatgcctttcagcggggattttgttcagggatttataagttatgtagggtctcattatagagaagtgaaccttgtataccctagatacagcaacttcatctctactgaatcttatttggttatgacagatctcaaggctaaccggctaatgaatcctgaaaagattaagcagcagataattgaatcatctgtgaggacttcacctggacttataggtcacatcctatccattaagcaactaagctgcatacaagcaattgtgggagacgcagttagtagaggtgatatcaatcctactctgaaaaaacttacacctatagagcaggtgctgatcaattgcgggttggcaattaacggacctaagctgtgcaaagaattgatccaccatgatgttgcctcagggcaagatggattgcttaattctatactcatcctctacagggagttggcaagattcaaagacaaccaaagaagtcaacaagggatgttccacgcttaccccgtattggtaagtagcaggcaacgagaacttatatctaggatcacccgcaaattctgggggcacattcttctttactccgggaacaaaaagttgataaataagtttatccagaatctcaagtccggctatctgatactagacttacaccagaatatcttcgttaagaatctatccaagtcagagaaacagattattatgacggggggtttgaaacgtgagtgggtttttaaggtaacagtcaaggagaccaaagaatggtataagttagtcggatacagtgccctgattaaggactaattggttgaactccggaaccctaatcctgccctaggtggttaggcattatttgcaatatattaaagaaaactttgaaaatacgaagtttctattcccagctttgtctggtggccggcatggtcccagcctcctcgctggcgccggctgggcaacattccgaggggaccgtcccctcggtaatggcgaatgggacgcggccggtcgatcgacgatccggctgctaacaaagcccgaaaggaagctgagttggctgctgccaccgctgagcaataactagcataaccccttggggcctctaaacgggtcttgaggggttttttgctgaaaggaggaactatatccggatcgagatcaattctgtgagcgtatggcaaacgaaggaaaaatagttatagtagccgcactcgatgggacatttcaacgtaaaccgtttaataatattttgaatcttattccattatctgaaatggtggtaaaactaactgctgtgtgtatgaaatgctttaaggaggcttccttttctaaacgattgggtgaggaaaccgagatagaaataataggaggtaatgatatgtatcaatcggtgtgtagaaagtgttacatcgactcataatattatattttttatctaaaaaactaaaaataaacattgattaaattttaatataatacttaaaaatggatgttgtgtcgttagataaaccgtttatgtattttgaggaaattgataatgagttagattacgaaccagaaagtgcaaatgaggtcgcaaaaaaactgccgtatcaaggacagttaaaactattactaggagaattattttttcttagtaagttacagcgacacggtatattagatggtgccaccgtagtgtatataggatctgctcccggtacacatatacgttatttgagagatcatttctataatttaggagtgatcccgaaaggaagctgagttggctgctgccaccgctgagcaataactagcataaccccttggggcctctaaacgggtcttgaggggttttttgctgaaaggaggaacgcgcctgatgcggtattttctccttacgcatctgtgcggtatttcacaccgcatatatggtgcactctcagtacaatctgctctgatgccgcatagttaagccagccccgacacccgccaacacccgctgacgcgccctgacgggcttgtctgctcccggcatccgcttacagacaagctgtgaccgtctccgggagctgcatgtgtcagaggttttcaccgtcatcaccgaaacgcgcgagacgaaagggcctcgtgatacgcctatttttataggttaatgtcatgataataatggtttcttagacgtcaggtggcacttttcggggaaatgtgcgcggaacccctatttgtttatttttctaaatacattcaaatatgtatccgctcatgagacaataaccctgataaatgcttcaataatattgaaaaaggaagagtatgagtattcaacatttccgtgtcgcccttattcccttttttgcggcattttgccttcctgtttttgctcacccagaaacgctggtgaaagtaaaagatgctgaagatcagttgggtgcacgagtgggttacatcgaactggatctcaacagcggtaagatccttgagagttttcgccccgaagaacgttttccaatgatgagcacttttaaagttctgctatgtggcgcggtattatcccgtattgacgccgggcaagagcaactcggtcgccgcatacactattctcagaatgacttggttgagtactcaccagtcacagaaaagcatcttacggatggcatgacagtaagagaattatgcagtgctgccataaccatgagtgataacactgcggccaacttacttctgacaacgatcggaggaccgaaggagctaaccgcttttttgcacaacatgggggatcatgtaactcgccttgatcgttgggaaccggagctgaatgaagccataccaaacgacgagcgtgacaccacgatgcctgtagcaatggcaacaacgttgcgcaaactattaactggcgaactacttactctagcttcccggcaacaattaatagactggatggaggcggataaagttgcaggaccacttctgcgctcggcccttccggctggctggtttattgctgataaatctggagccggtgagcgtgggtctcgcggtatcattgcagcactggggccagatggtaagccctcccgtatcgtagttatctacacgacggggagtcaggcaactatggatgaacgaaatagacagatcgctgagataggtgcctcactgattaagcattggtaactgtcagaccaagtttactcatatatactttagattgatttaaaacttcatttttaatttaaaaggatctaggtgaagatcctttttgataatctcatgaccaaaatcccttaacgtgagttttcgttccactgagcgtcagaccccgtagaaaagatcaaaggatcttcttgagatcctttttttctgcgcgtaatctgctgcttgcaaacaaaaaaaccaccgctaccagcggtggtttgtttgccggatcaagagctaccaactctttttccgaaggtaactggcttcagcagagcgcagataccaaatactgtccttctagtgtagccgtagttaggccaccacttcaagaactctgtagcaccgcctacatacctcgctctgctaatcctgttaccagtggctgctgccagtggcgataagtcgtgtcttaccgggttggactcaagacgatagttaccggataaggcgcagcggtcgggctgaacggggggttcgtgcacacagcccagcttggagcgaacgacctacaccgaactgagatacctacagcgtgagcattgagaaagcgccacgcttcccgaagggagaaaggcggacaggtatccggtaagcggcagggtcggaacaggagagcgcacgagggagcttccagggggaaacgcctggtatctttatagtcctgtcgggtttcgccacctctgacttgagcgtcgatttttgtgatgctcgtcaggggggcggagcctatggaaaaacgccagcaacgcggcctttttacggttcctggccttttgctggccttttgctcacatgttctttcctgcgttatcccctgattctgtggataaccgtattaccgcctttgagtgagctgataccgctcgccgcagccgaacgaccgagcgcagcgagtcagtgagcgaggaagcggaagagcgcccaatacgcaaaccgcctctccccgcgcgttggccgattcattaatgcagctggcacgacaggtttcccgactggaaagcgggcagtgagcgcaacgcaattaatgtgagttagctcactcattaggcaccccaggctttacactttatgcttccggctcgtatgttgtgtggaattgtgagcggataacaatttcacacaggaaacagctatgaccatgattacgccaagcttacgcgtcctggcattatgcccagtacatgaccttatgggactttcctacttggcagtacatctacgtattagtcatcgctattaccatggtgatgcggttttggcagtacatcaatgggcgtggatagcggtttgactcacggggatttccaagtctccaccccattgacgtcaatgggagtttgttttggcaccaaaatcaacgggactttccaaaatgtcgtaacaactccgccccattgacgcaaatgggcggtaggcgtgtacggtgggaggtctatataagcagagctcgtttagtgaaccgtgg

SEQ ID NO: 41 - DNA, 12133 bp, Artificial Sequence
  Vector with soluble s4-1BBL ectodomain construct
gttgacattgattattgactagttattaatagtaatcaattacggggtcattagttcatagcccatatatggagttccgcgttacataacttacggtaaatggcccgcctggctgaccgcccaacgacccccgcccattgacgtcaataatgacgtatgttcccatagtaacgccaatagggactttccattgacgtcaatgggtggagtatttacggtaaactgcccacttggcagtacatcaagtgtatcatatgccaagtccgccccctattgacgtcaatgacggtaaatggcccgcctggcattatgcccagtacatgaccttacgggactttcctacttggcagtacatctacgtattagtcatcgctattaccatggtgatgcggttttggcagtacaccaatgggcgtggatagcggtttgactcacggggatttccaagtctccaccccattgacgtcaatgggagtttgttttggcaccaaaatcaacgggactttccaaaatgtcgtaataaccccgccccgttgacgcaaatgggcggtaggcgtgtacggtgggaggtctatataagcagagctcgtttagtgaaccgtcagatctctagaagctgggtaccagctgctagcaagcttgccaccatgcccatgggatcattgcaacctctggctacactgtacctgctcggcatgttggtggccagttgcttgggcggcagcggatcaaattggagtcatccccagttcgagaagggcggcagtggaggacatcaccatcatcaccatggcgggagcggtggaggcgttcgactttgggctacaagacaggcaatgctgggccaggtccatgaggttcctgaggggtggctcattttcgtggccgagcaggaggagctgtatgttcgcgtgcaaaacggctttaggaaggtccagctggaagcgcggacacctttgcccaggggaaccgataacgagggctcacttgatcttcgacaagggatgtttgcacagctcgtagcacaaaacgttctgctcatcgacggccccttgtcctggtactcagacccaggattggccggtgtcagtcttaccggcggactcagctacaaggaggacactaaagagttggtcgtggcaaaggcaggcgtgtattatgtgttcttccaactggaactgaggagggttgtggccggtgaaggcagcggttccgtcagtttggcgctgcacctgcagcctttgaggagtgccgcaggtgctgctgcattggctctgactgtcgacctgccacctgcctcatccgaggctagaaattctgcctttggatttcaaggcagactgttgcatctgtcagcagggcagagacttggggtgcacctccatactgaggcaagagctagacacgcttggcagctcacccaaggggccactgttcttggactcttccgggtgacaccagagatacccgcaggactcccaagtccaaggagtgaaggcggtggcggaagcggtggaggtggatctggcggaggtggaagtcttgacctgcggcagggcatgttcgctcaattggtggcccagaatgttcttctgatcgatggtcctctgtcttggtattctgatcctggcttggcaggggtgtcacttactggtggtctttcatataaagaagacacaaaggagctcgtggtggctaaagctggagtttattacgtgttttttcaattggaactccggagagtggttgccggcgaaggttccggttctgtttctcttgctctgcacttgcaaccactgagaagtgctgcaggcgcagctgctttggctttgaccgtggatttgcctcctgcttcttccgaagccagaaacagcgcttttggctttcaaggaaggctcctgcatctctctgccggccaacgactgggagtgcatttgcacactgaagcacgcgcaagacatgcatggcagcttactcaaggagctacggtgctcggattgtttcgggtcacccctgagatacctgctgggctgcctagtcctagatcagaaggaggtggtggctctggtggaggaggttctggagggggaggaagcctggatctgcgacaaggcatgtttgcccagctcgttgcacaaaatgtgctgctgatcgacggacctctctcctggtattccgatcccgggttggctggagttagtctcacgggaggactgtcctacaaagaagatacgaaggaactcgtggtcgcaaaagctggggtttactacgtttttttccaacttgagctgcggagagttgtcgccggagaagggagcggatctgtatcattggcacttcaccttcagccgctcagatctgctgcaggtgccgctgcacttgctttgactgtggatctgcctccagcctcttctgaagcccgcaactctgcgtttggattccaagggagactgctccacctcagtgctggccaaagacttggagtccatctgcacacagaagcgagagccagacatgcctggcagctcactcagggggctactgtcctcggactgtttagagtcactccagaaataccagccggcctgccttcacctcgaagcgaataagcggccgcagatccagacatgataagatacattgatgagtttggacaaaccacaactagaatgcagtgaaaaaaatgctttatttgtgaaatttgtgatgctattgctttatttgtaaccattataagctgcaataaacaagttaacaacaacaattgcattcattttatgtttcaggttcagggggaggtgtgggaggttttttaaagcaagtaaaacctctacaaatgtggtatggctgattatgatccggctgcctcgcgcgtttcggtgatgacggtgaaaacctctgacacatgcagctcccggagacggtcacagcttgtctgtaagcggatgccgggagcagacaagcccgtcaggcgtcagcgggtgttggcgggtgtcggggcgcagccatgaggtcgactctagaggatcgatgccccgccccggacgaactaaacctgactacgacatctctgccccttcttcgcggggcagtgcatgtaatcccttcagttggttggtacaacttgccaactgggccctgttccacatgtgacacggggggggaccaaacacaaaggggttctctgactgtagttgacatccttataaatggatgtgcacatttgccaacactgagtggctttcatcctggagcagactttgcagtctgtggactgcaacacaacattgcctttatgtgtaactcttggctgaagctcttacaccaatgctgggggacatgtacctcccaggggcccaggaagactacgggaggctacaccaacgtcaatcagaggggcctgtgtagctaccgataagcggaccctcaagagggcattagcaatagtgtttataaggcccccttgttaaccctaaacgggtagcatatgcttcccgggtagtagtatatactatccagactaaccctaattcaatagcatatgttacccaacgggaagcatatgctatcgaattagggttagtaaaagggtcctaaggaacagcgatatctcccaccccatgagctgtcacggttttatttacatggggtcaggattccacgagggtagtgaaccattttagtcacaagggcagtggctgaagatcaaggagcgggcagtgaactctcctgaatcttcgcctgcttcttcattctccttcgtttagctaatagaataactgctgagttgtgaacagtaaggtgtatgtgaggtgctcgaaaacaaggtttcaggtgacgcccccagaataaaatttggacggggggttcagtggtggcattgtgctatgacaccaatataaccctcacaaaccccttgggcaataaatactagtgtaggaatgaaacattctgaatatctttaacaatagaaatccatggggtggggacaagccgtaaagactggatgtccatctcacacgaatttatggctatgggcaacacataatcctagtgcaatatgatactggggttattaagatgtgtcccaggcagggaccaagacaggtgaaccatgttgttacactctatttgtaacaaggggaaagagagtggacgccgacagcagcggactccactggttgtctctaacacccccgaaaattaaacggggctccacgccaatggggcccataaacaaagacaagtggccactcttttttttgaaattgtggagtgggggcacgcgtcagcccccacacgccgccctgcggttttggactgtaaaataagggtgtaataacttggctgattgtaaccccgctaaccactgcggtcaaaccacttgcccacaaaaccactaatggcaccccggggaatacctgcataagtaggtgggcgggccaagataggggcgcgattgctgcgatctggaggacaaattacacacacttgcgcctgagcgccaagcacagggttgttggtcctcatattcacgaggtcgctgagagcacggtgggctaatgttgccatgggtagcatatactacccaaatatctggatagcatatgctatcctaatctatatctgggtagcataggctatcctaatctatatctgggtagcatatgctatcctaatctatatctgggtagtatatgctatcctaatttatatctgggtagcataggctatcctaatctatatctgggtagcatatgctatcctaatctatatctgggtagtatatgctatcctaatctgtatccgggtagcatatgctatcctaatagagattagggtagtatatgctatcctaatttatatctgggtagcatatactacccaaatatctggatagcatatgctatcctaatctatatctgggtagcatatgctatcctaatctatatctgggtagcataggctatcctaatctatatctgggtagcatatgctatcctaatctatatctgggtagtatatgctatcctaatttatatctgggtagcataggctatcctaatctatatctgggtagcatatgctatcctaatctatatctgggtagtatatgctatcctaatctgtatccgggtagcatatgctatcctcatgcatatacagtcagcatatgatacccagtagtagagtgggagtgctatcctttgcatatgccgccacctcccaagggggcgtgaattttcgctgcttgtccttttcctgctggttgctcccattcttaggtgaatttaaggaggccaggctaaagccgtcgcatgtctgattgctcaccaggtaaatgtcgctaatgttttccaacgcgagaaggtgttgagcgcggagctgagtgacgtgacaacatgggtatgcccaattgccccatgttgggaggacgaaaatggtgacaagacagatggccagaaatacaccaacagcacgcatgatgtctactggggatttattctttagtgcgggggaatacacggcttttaatacgattgagggcgtctcctaacaagttacatcactcctgcccttcctcaccctcatctccatcacctccttcatctccgtcatctccgtcatcaccctccgcggcagccccttccaccataggtggaaaccagggaggcaaatctactccatcgtcaaagctgcacacagtcaccctgatattgcaggtaggagcgggctttgtcataacaaggtccttaatcgcatccttcaaaacctcagcaaatatatgagtttgtaaaaagaccatgaaataacagacaatggactcccttagcgggccaggttgtgggccgggtccaggggccattccaaaggggagacgactcaatggtgtaagacgacattgtggaatagcaagggcagttcctcgccttaggttgtaaagggaggtcttactacctccatatacgaacacaccggcgacccaagttccttcgtcggtagtcctttctacgtgactcctagccaggagagctcttaaaccttctgcaatgttctcaaatttcgggttggaacctccttgaccacgatgctttccaaaccaccctccttttttgcgcctgcctccatcaccctgaccccggggtccagtgcttgggccttctcctgggtcatctgcggggccctgctctatcgctcccgggggcacgtcaggctcaccatctgggccaccttcttggtggtattcaaaataatcggcttcccctacagggtggaaaaatggccttctacctggagggggcctgcgcggtggagacccggatgatgatgactgactactgggactcctgggcctcttttctccacgtccacgacctctccccctggctctttcacgacttccccccctggctctttcacgtcctctaccccggcggcctccactacctcctcgaccccggcctccactacctcctcgaccccggcctccactgcctcctcgaccccggcctccacctcctgctcctgcccctcctgctcctgcccctcctcctgctcctgcccctcctgcccctcctgctcctgcccctcctgcccctcctgctcctgcccctcctgcccctcctgctcctgcccctcctgcccctcctcctgctcctgcccctcctgcccctcctcctgctcctgcccctcctgcccctcctgctcctgcccctcctgcccctcctgctcctgcccctcctgcccctcctgctcctgcccctcctgctcctgcccctcctgctcctgcccctcctgctcctgcccctcctgcccctcctgcccctcctcctgctcctgcccctcctgctcctgcccctcctgcccctcctgcccctcctgctcctgcccctcctcctgctcctgcccctcctgcccctcctgcccctcctcctgctcctgcccctcctgcccctcctcctgctcctgcccctcctcctgctcctgcccctcctgcccctcctgcccctcctcctgctcctgcccctcctgcccctcctcctgctcctgcccctcctcctgctcctgcccctcctgcccctcctgcccctcctcctgctcctgcccctcctcctgctcctgcccctcctgcccctcctgcccctcctgcccctcctcctgctcctgcccctcctcctgctcctgcccctcctgctcctgcccctcccgctcctgctcctgctcctgttccaccgtgggtccctttgcagccaatgcaacttggacgtttttggggtctccggacaccatctctatgtcttggccctgatcctgagccgcccggggctcctggtcttccgcctcctcgtcctcgtcctcttccccgtcctcgtccatggttatcaccccctcttctttgaggtccactgccgccggagccttctggtccagatgtgtctcccttctctcctaggccatttccaggtcctgtacctggcccctcgtcagacatgattcacactaaaagagatcaatagacatctttattagacgacgctcagtgaatacagggagtgcagactcctgccccctccaacagcccccccaccctcatccccttcatggtcgctgtcagacagatccaggtctgaaaattccccatcctccgaaccatcctcgtcctcatcaccaattactcgcagcccggaaaactcccgctgaacatcctcaagatttgcgtcctgagcctcaagccaggcctcaaattcctcgtccccctttttgctggacggtagggatggggattctcgggacccctcctcttcctcttcaaggtcaccagacagagatgctactggggcaacggaagaaaagctgggtgcggcctgtgaggatcagcttatcgatgataagctgtcaaacatgagaattcttgaagacgaaagggcctcgtgatacgcctatttttataggttaatgtcatgataataatggtttcttagacgtcaggtggcacttttcggggaaatgtgcgcggaacccctatttgtttatttttctaaatacattcaaatatgtatccgctcatgagacaataaccctgataaatgcttcaataatattgaaaaaggaagagtatgagtattcaacatttccgtgtcgcccttattcccttttttgcggcattttgccttcctgtttttgctcacccagaaacgctggtgaaagtaaaagatgctgaagatcagttgggtgcacgagtgggttacatcgaactggatctcaacagcggtaagatccttgagagttttcgccccgaagaacgttttccaatgatgagcacttttaaagttctgctatgtggcgcggtattatcccgtgttgacgccgggcaagagcaactcggtcgccgcatacactattctcagaatgacttggttgagtactcaccagtcacagaaaagcatcttacggatggcatgacagtaagagaattatgcagtgctgccataaccatgagtgataacactgcggccaacttacttctgacaacgatcggaggaccgaaggagctaaccgcttttttgcacaacatgggggatcatgtaactcgccttgatcgttgggaaccggagctgaatgaagccataccaaacgacgagcgtgacaccacgatgcctgcagcaatggcaacaacgttgcgcaaactattaactggcgaactacttactctagcttcccggcaacaattaatagactggatggaggcggataaagttgcaggaccacttctgcgctcggcccttccggctggctggtttattgctgataaatctggagccggtgagcgtgggtctcgcggtatcattgcagcactggggccagatggtaagccctcccgtatcgtagttatctacacgacggggagtcaggcaactatggatgaacgaaatagacagatcgctgagataggtgcctcactgattaagcattggtaactgtcagaccaagtttactcatatatactttagattgatttaaaacttcatttttaatttaaaaggatctaggtgaagatcctttttgataatctcatgaccaaaatcccttaacgtgagttttcgttccactgagcgtcagaccccgtagaaaagatcaaaggatcttcttgagatcctttttttctgcgcgtaatctgctgcttgcaaacaaaaaaaccaccgctaccagcggtggtttgtttgccggatcaagagctaccaactctttttccgaaggtaactggcttcagcagagcgcagataccaaatactgtccttctagtgtagccgtagttaggccaccacttcaagaactctgtagcaccgcctacatacctcgctctgctaatcctgttaccagtggctgctgccagtggcgataagtcgtgtcttaccgggttggactcaagacgatagttaccggataaggcgcagcggtcgggctgaacggggggttcgtgcacacagcccagcttggagcgaacgacctacaccgaactgagatacctacagcgtgagctatgagaaagcgccacgcttcccgaagggagaaaggcggacaggtatccggtaagcggcagggtcggaacaggagagcgcacgagggagcttccagggggaaacgcctggtatctttatagtcctgtcgggtttcgccacctctgacttgagcgtcgatttttgtgatgctcgtcaggggggcggagcctatggaaaaacgccagcaacgcggcctttttacggttcctggccttttgctggccttgaagctgtccctgatggtcgtcatctacctgcctggacagcatggcctgcaacgcgggcatcccgatgccgccggaagcgagaagaatcataatggggaaggccatccagcctcgcgtcgcgaacgccagcaagacgtagcccagcgcgtcggccccgagatgcgccgcgtgcggctgctggagatggcggacgcgatggatatgttctgccaagggttggtttgcgcattcacagttctccgcaagaattgattggctccaattcttggagtggtgaatccgttagcgaggtgccgccctgcttcatccccgtggcccgttgctcgcgtttgctggcggtgtccccggaagaaatatatttgcatgtctttagttctatgatgacacaaaccccgcccagcgtcttgtcattggcgaattcgaacacgcagatgcagtcggggcggcgcggtccgaggtccacttcgcatattaaggtgacgcgtgtggcctcgaacaccgagcgaccctgcagcgacccgcttaacagcgtcaacagcgtgccgcagatcccggggggcaatgagatatgaaaaagcctgaactcaccgcgacgtctgtcgagaagtttctgatcgaaaagttcgacagcgtctccgacctgatgcagctctcggagggcgaagaatctcgtgctttcagcttcgatgtaggagggcgtggatatgtcctgcgggtaaatagctgcgccgatggtttctacaaagatcgttatgtttatcggcactttgcatcggccgcgctcccgattccggaagtgcttgacattggggaattcagcgagagcctgacctattgcatctcccgccgtgcacagggtgtcacgttgcaagacctgcctgaaaccgaactgcccgctgttctgcagccggtcgcggaggccatggatgcgatcgctgcggccgatcttagccagacgagcgggttcggcccattcggaccgcaaggaatcggtcaatacactacatggcgtgatttcatatgcgcgattgctgatccccatgtgtatcactggcaaactgtgatggacgacaccgtcagtgcgtccgtcgcgcaggctctcgatgagctgatgctttgggccgaggactgccccgaagtccggcacctcgtgcacgcggatttcggctccaacaatgtcctgacggacaatggccgcataacagcggtcattgactggagcgaggcgatgttcggggattcccaatacgaggtcgccaacatcttcttctggaggccgtggttggcttgtatggagcagcagacgcgctacttcgagcggaggcatccggagcttgcaggatcgccgcggctccgggcgtatatgctccgcattggtcttgaccaactctatcagagcttggttgacggcaatttcgatgatgcagcttgggcgcagggtcgatgcgacgcaatcgtccgatccggagccgggactgtcgggcgtacacaaatcgcccgcagaagcgcggccgtctggaccgatggctgtgtagaagtactcgccgatagtggaaaccgacgccccagcactcgtccggatcgggagatgggggaggctaactgaaacacggaaggagacaataccggaaggaacccgcgctatgacggcaataaaaagacagaataaaacgcacgggtgttgggtcgtttgttcataaacgcggggttcggtcccagggctggcactctgtcgataccccaccgagaccccattggggccaatacgcccgcgtttcttccttttccccaccccaccccccaagttcgggtgaaggcccagggctcgcagccaacgtcggggcggcaggccctgccatagccactggccccgtgggttagggacggggtcccccatggggaatggtttatggttcgtgggggttattattttgggcgttgcgtggggtcaggtccacgactggactgagcagacagacccatggtttttggatggcctgggcatggaccgcatgtactggcgcgacacgaacaccgggcgtctgtggctgccaaacacccccgacccccaaaaaccaccgcgcggatttctggcgtgccaagctagtcgaccaattctcatgtttgacagcttatcatcgcagatccgggcaacgttgttgccattgctgcaggcgcagaactggtaggtatggaagatctatacattgaatcaatattggcaattagccatattagtcattggttatatagcataaatcaatattggctattggccattgcatacgttgtatctatatcataatatgtacatttatattggctcatgtccaatatgaccgccat

SEQ ID NO: 42 - DNA, 12193 bp, Artificial Sequence
  Vector with soluble s4-1BBL ectodomain construct
gttgacattgattattgactagttattaatagtaatcaattacggggtcattagttcatagcccatatatggagttccgcgttacataacttacggtaaatggcccgcctggctgaccgcccaacgacccccgcccattgacgtcaataatgacgtatgttcccatagtaacgccaatagggactttccattgacgtcaatgggtggagtatttacggtaaactgcccacttggcagtacatcaagtgtatcatatgccaagtccgccccctattgacgtcaatgacggtaaatggcccgcctggcattatgcccagtacatgaccttacgggactttcctacttggcagtacatctacgtattagtcatcgctattaccatggtgatgcggttttggcagtacaccaatgggcgtggatagcggtttgactcacggggatttccaagtctccaccccattgacgtcaatgggagtttgttttggcaccaaaatcaacgggactttccaaaatgtcgtaataaccccgccccgttgacgcaaatgggcggtaggcgtgtacggtgggaggtctatataagcagagctcgtttagtgaaccgtcagatctctagaagctgggtaccagctgctagcaagcttgccaccatgcccatgggatcattgcaacctctggctacactgtacctgctcggcatgttggtggccagttgcttgggcggcagcggatcaaattggagtcatccccagttcgagaagggcggcagtggaggacatcaccatcatcaccatggcgggagcggtggaggctcttctggtgctggaggatcaggtggttctagtggaagtgatggtgctagcgggtctggcgttcgactttgggctacaagacaggcaatgctgggccaggtccatgaggttcctgaggggtggctcattttcgtggccgagcaggaggagctgtatgttcgcgtgcaaaacggctttaggaaggtccagctggaagcgcggacacctttgcccaggggaaccgataacgagggctcacttgatcttcgacaagggatgtttgcacagctcgtagcacaaaacgttctgctcatcgacggccccttgtcctggtactcagacccaggattggccggtgtcagtcttaccggcggactcagctacaaggaggacactaaagagttggtcgtggcaaaggcaggcgtgtattatgtgttcttccaactggaactgaggagggttgtggccggtgaaggcagcggttccgtcagtttggcgctgcacctgcagcctttgaggagtgccgcaggtgctgctgcattggctctgactgtcgacctgccacctgcctcatccgaggctagaaattctgcctttggatttcaaggcagactgttgcatctgtcagcagggcagagacttggggtgcacctccatactgaggcaagagctagacacgcttggcagctcacccaaggggccactgttcttggactcttccgggtgacaccagagatacccgcaggactcccaagtccaaggagtgaaggcggtggcggaagcggtggaggtggatctggcggaggtggaagtcttgacctgcggcagggcatgttcgctcaattggtggcccagaatgttcttctgatcgatggtcctctgtcttggtattctgatcctggcttggcaggggtgtcacttactggtggtctttcatataaagaagacacaaaggagctcgtggtggctaaagctggagtttattacgtgttttttcaattggaactccggagagtggttgccggcgaaggttccggttctgtttctcttgctctgcacttgcaaccactgagaagtgctgcaggcgcagctgctttggctttgaccgtggatttgcctcctgcttcttccgaagccagaaacagcgcttttggctttcaaggaaggctcctgcatctctctgccggccaacgactgggagtgcatttgcacactgaagcacgcgcaagacatgcatggcagcttactcaaggagctacggtgctcggattgtttcgggtcacccctgagatacctgctgggctgcctagtcctagatcagaaggaggtggtggctctggtggaggaggttctggagggggaggaagcctggatctgcgacaaggcatgtttgcccagctcgttgcacaaaatgtgctgctgatcgacggacctctctcctggtattccgatcccgggttggctggagttagtctcacgggaggactgtcctacaaagaagatacgaaggaactcgtggtcgcaaaagctggggtttactacgtttttttccaacttgagctgcggagagttgtcgccggagaagggagcggatctgtatcattggcacttcaccttcagccgctcagatctgctgcaggtgccgctgcacttgctttgactgtggatctgcctccagcctcttctgaagcccgcaactctgcgtttggattccaagggagactgctccacctcagtgctggccaaagacttggagtccatctgcacacagaagcgagagccagacatgcctggcagctcactcagggggctactgtcctcggactgtttagagtcactccagaaataccagccggcctgccttcacctcgaagcgaataagcggccgcagatccagacatgataagatacattgatgagtttggacaaaccacaactagaatgcagtgaaaaaaatgctttatttgtgaaatttgtgatgctattgctttatttgtaaccattataagctgcaataaacaagttaacaacaacaattgcattcattttatgtttcaggttcagggggaggtgtgggaggttttttaaagcaagtaaaacctctacaaatgtggtatggctgattatgatccggctgcctcgcgcgtttcggtgatgacggtgaaaacctctgacacatgcagctcccggagacggtcacagcttgtctgtaagcggatgccgggagcagacaagcccgtcaggcgtcagcgggtgttggcgggtgtcggggcgcagccatgaggtcgactctagaggatcgatgccccgccccggacgaactaaacctgactacgacatctctgccccttcttcgcggggcagtgcatgtaatcccttcagttggttggtacaacttgccaactgggccctgttccacatgtgacacggggggggaccaaacacaaaggggttctctgactgtagttgacatccttataaatggatgtgcacatttgccaacactgagtggctttcatcctggagcagactttgcagtctgtggactgcaacacaacattgcctttatgtgtaactcttggctgaagctcttacaccaatgctgggggacatgtacctcccaggggcccaggaagactacgggaggctacaccaacgtcaatcagaggggcctgtgtagctaccgataagcggaccctcaagagggcattagcaatagtgtttataaggcccccttgttaaccctaaacgggtagcatatgcttcccgggtagtagtatatactatccagactaaccctaattcaatagcatatgttacccaacgggaagcatatgctatcgaattagggttagtaaaagggtcctaaggaacagcgatatctcccaccccatgagctgtcacggttttatttacatggggtcaggattccacgagggtagtgaaccattttagtcacaagggcagtggctgaagatcaaggagcgggcagtgaactctcctgaatcttcgcctgcttcttcattctccttcgtttagctaatagaataactgctgagttgtgaacagtaaggtgtatgtgaggtgctcgaaaacaaggtttcaggtgacgcccccagaataaaatttggacggggggttcagtggtggcattgtgctatgacaccaatataaccctcacaaaccccttgggcaataaatactagtgtaggaatgaaacattctgaatatctttaacaatagaaatccatggggtggggacaagccgtaaagactggatgtccatctcacacgaatttatggctatgggcaacacataatcctagtgcaatatgatactggggttattaagatgtgtcccaggcagggaccaagacaggtgaaccatgttgttacactctatttgtaacaaggggaaagagagtggacgccgacagcagcggactccactggttgtctctaacacccccgaaaattaaacggggctccacgccaatggggcccataaacaaagacaagtggccactcttttttttgaaattgtggagtgggggcacgcgtcagcccccacacgccgccctgcggttttggactgtaaaataagggtgtaataacttggctgattgtaaccccgctaaccactgcggtcaaaccacttgcccacaaaaccactaatggcaccccggggaatacctgcataagtaggtgggcgggccaagataggggcgcgattgctgcgatctggaggacaaattacacacacttgcgcctgagcgccaagcacagggttgttggtcctcatattcacgaggtcgctgagagcacggtgggctaatgttgccatgggtagcatatactacccaaatatctggatagcatatgctatcctaatctatatctgggtagcataggctatcctaatctatatctgggtagcatatgctatcctaatctatatctgggtagtatatgctatcctaatttatatctgggtagcataggctatcctaatctatatctgggtagcatatgctatcctaatctatatctgggtagtatatgctatcctaatctgtatccgggtagcatatgctatcctaatagagattagggtagtatatgctatcctaatttatatctgggtagcatatactacccaaatatctggatagcatatgctatcctaatctatatctgggtagcatatgctatcctaatctatatctgggtagcataggctatcctaatctatatctgggtagcatatgctatcctaatctatatctgggtagtatatgctatcctaatttatatctgggtagcataggctatcctaatctatatctgggtagcatatgctatcctaatctatatctgggtagtatatgctatcctaatctgtatccgggtagcatatgctatcctcatgcatatacagtcagcatatgatacccagtagtagagtgggagtgctatcctttgcatatgccgccacctcccaagggggcgtgaattttcgctgcttgtccttttcctgctggttgctcccattcttaggtgaatttaaggaggccaggctaaagccgtcgcatgtctgattgctcaccaggtaaatgtcgctaatgttttccaacgcgagaaggtgttgagcgcggagctgagtgacgtgacaacatgggtatgcccaattgccccatgttgggaggacgaaaatggtgacaagacagatggccagaaatacaccaacagcacgcatgatgtctactggggatttattctttagtgcgggggaatacacggcttttaatacgattgagggcgtctcctaacaagttacatcactcctgcccttcctcaccctcatctccatcacctccttcatctccgtcatctccgtcatcaccctccgcggcagccccttccaccataggtggaaaccagggaggcaaatctactccatcgtcaaagctgcacacagtcaccctgatattgcaggtaggagcgggctttgtcataacaaggtccttaatcgcatccttcaaaacctcagcaaatatatgagtttgtaaaaagaccatgaaataacagacaatggactcccttagcgggccaggttgtgggccgggtccaggggccattccaaaggggagacgactcaatggtgtaagacgacattgtggaatagcaagggcagttcctcgccttaggttgtaaagggaggtcttactacctccatatacgaacacaccggcgacccaagttccttcgtcggtagtcctttctacgtgactcctagccaggagagctcttaaaccttctgcaatgttctcaaatttcgggttggaacctccttgaccacgatgctttccaaaccaccctccttttttgcgcctgcctccatcaccctgaccccggggtccagtgcttgggccttctcctgggtcatctgcggggccctgctctatcgctcccgggggcacgtcaggctcaccatctgggccaccttcttggtggtattcaaaataatcggcttcccctacagggtggaaaaatggccttctacctggagggggcctgcgcggtggagacccggatgatgatgactgactactgggactcctgggcctcttttctccacgtccacgacctctccccctggctctttcacgacttccccccctggctctttcacgtcctctaccccggcggcctccactacctcctcgaccccggcctccactacctcctcgaccccggcctccactgcctcctcgaccccggcctccacctcctgctcctgcccctcctgctcctgcccctcctcctgctcctgcccctcctgcccctcctgctcctgcccctcctgcccctcctgctcctgcccctcctgcccctcctgctcctgcccctcctgcccctcctcctgctcctgcccctcctgcccctcctcctgctcctgcccctcctgcccctcctgctcctgcccctcctgcccctcctgctcctgcccctcctgcccctcctgctcctgcccctcctgctcctgcccctcctgctcctgcccctcctgctcctgcccctcctgcccctcctgcccctcctcctgctcctgcccctcctgctcctgcccctcctgcccctcctgcccctcctgctcctgcccctcctcctgctcctgcccctcctgcccctcctgcccctcctcctgctcctgcccctcctgcccctcctcctgctcctgcccctcctcctgctcctgcccctcctgcccctcctgcccctcctcctgctcctgcccctcctgcccctcctcctgctcctgcccctcctcctgctcctgcccctcctgcccctcctgcccctcctcctgctcctgcccctcctcctgctcctgcccctcctgcccctcctgcccctcctgcccctcctcctgctcctgcccctcctcctgctcctgcccctcctgctcctgcccctcccgctcctgctcctgctcctgttccaccgtgggtccctttgcagccaatgcaacttggacgtttttggggtctccggacaccatctctatgtcttggccctgatcctgagccgcccggggctcctggtcttccgcctcctcgtcctcgtcctcttccccgtcctcgtccatggttatcaccccctcttctttgaggtccactgccgccggagccttctggtccagatgtgtctcccttctctcctaggccatttccaggtcctgtacctggcccctcgtcagacatgattcacactaaaagagatcaatagacatctttattagacgacgctcagtgaatacagggagtgcagactcctgccccctccaacagcccccccaccctcatccccttcatggtcgctgtcagacagatccaggtctgaaaattccccatcctccgaaccatcctcgtcctcatcaccaattactcgcagcccggaaaactcccgctgaacatcctcaagatttgcgtcctgagcctcaagccaggcctcaaattcctcgtccccctttttgctggacggtagggatggggattctcgggacccctcctcttcctcttcaaggtcaccagacagagatgctactggggcaacggaagaaaagctgggtgcggcctgtgaggatcagcttatcgatgataagctgtcaaacatgagaattcttgaagacgaaagggcctcgtgatacgcctatttttataggttaatgtcatgataataatggtttcttagacgtcaggtggcacttttcggggaaatgtgcgcggaacccctatttgtttatttttctaaatacattcaaatatgtatccgctcatgagacaataaccctgataaatgcttcaataatattgaaaaaggaagagtatgagtattcaacatttccgtgtcgcccttattcccttttttgcggcattttgccttcctgtttttgctcacccagaaacgctggtgaaagtaaaagatgctgaagatcagttgggtgcacgagtgggttacatcgaactggatctcaacagcggtaagatccttgagagttttcgccccgaagaacgttttccaatgatgagcacttttaaagttctgctatgtggcgcggtattatcccgtgttgacgccgggcaagagcaactcggtcgccgcatacactattctcagaatgacttggttgagtactcaccagtcacagaaaagcatcttacggatggcatgacagtaagagaattatgcagtgctgccataaccatgagtgataacactgcggccaacttacttctgacaacgatcggaggaccgaaggagctaaccgcttttttgcacaacatgggggatcatgtaactcgccttgatcgttgggaaccggagctgaatgaagccataccaaacgacgagcgtgacaccacgatgcctgcagcaatggcaacaacgttgcgcaaactattaactggcgaactacttactctagcttcccggcaacaattaatagactggatggaggcggataaagttgcaggaccacttctgcgctcggcccttccggctggctggtttattgctgataaatctggagccggtgagcgtgggtctcgcggtatcattgcagcactggggccagatggtaagccctcccgtatcgtagttatctacacgacggggagtcaggcaactatggatgaacgaaatagacagatcgctgagataggtgcctcactgattaagcattggtaactgtcagaccaagtttactcatatatactttagattgatttaaaacttcatttttaatttaaaaggatctaggtgaagatcctttttgataatctcatgaccaaaatcccttaacgtgagttttcgttccactgagcgtcagaccccgtagaaaagatcaaaggatcttcttgagatcctttttttctgcgcgtaatctgctgcttgcaaacaaaaaaaccaccgctaccagcggtggtttgtttgccggatcaagagctaccaactctttttccgaaggtaactggcttcagcagagcgcagataccaaatactgtccttctagtgtagccgtagttaggccaccacttcaagaactctgtagcaccgcctacatacctcgctctgctaatcctgttaccagtggctgctgccagtggcgataagtcgtgtcttaccgggttggactcaagacgatagttaccggataaggcgcagcggtcgggctgaacggggggttcgtgcacacagcccagcttggagcgaacgacctacaccgaactgagatacctacagcgtgagctatgagaaagcgccacgcttcccgaagggagaaaggcggacaggtatccggtaagcggcagggtcggaacaggagagcgcacgagggagcttccagggggaaacgcctggtatctttatagtcctgtcgggtttcgccacctctgacttgagcgtcgatttttgtgatgctcgtcaggggggcggagcctatggaaaaacgccagcaacgcggcctttttacggttcctggccttttgctggccttgaagctgtccctgatggtcgtcatctacctgcctggacagcatggcctgcaacgcgggcatcccgatgccgccggaagcgagaagaatcataatggggaaggccatccagcctcgcgtcgcgaacgccagcaagacgtagcccagcgcgtcggccccgagatgcgccgcgtgcggctgctggagatggcggacgcgatggatatgttctgccaagggttggtttgcgcattcacagttctccgcaagaattgattggctccaattcttggagtggtgaatccgttagcgaggtgccgccctgcttcatccccgtggcccgttgctcgcgtttgctggcggtgtccccggaagaaatatatttgcatgtctttagttctatgatgacacaaaccccgcccagcgtcttgtcattggcgaattcgaacacgcagatgcagtcggggcggcgcggtccgaggtccacttcgcatattaaggtgacgcgtgtggcctcgaacaccgagcgaccctgcagcgacccgcttaacagcgtcaacagcgtgccgcagatcccggggggcaatgagatatgaaaaagcctgaactcaccgcgacgtctgtcgagaagtttctgatcgaaaagttcgacagcgtctccgacctgatgcagctctcggagggcgaagaatctcgtgctttcagcttcgatgtaggagggcgtggatatgtcctgcgggtaaatagctgcgccgatggtttctacaaagatcgttatgtttatcggcactttgcatcggccgcgctcccgattccggaagtgcttgacattggggaattcagcgagagcctgacctattgcatctcccgccgtgcacagggtgtcacgttgcaagacctgcctgaaaccgaactgcccgctgttctgcagccggtcgcggaggccatggatgcgatcgctgcggccgatcttagccagacgagcgggttcggcccattcggaccgcaaggaatcggtcaatacactacatggcgtgatttcatatgcgcgattgctgatccccatgtgtatcactggcaaactgtgatggacgacaccgtcagtgcgtccgtcgcgcaggctctcgatgagctgatgctttgggccgaggactgccccgaagtccggcacctcgtgcacgcggatttcggctccaacaatgtcctgacggacaatggccgcataacagcggtcattgactggagcgaggcgatgttcggggattcccaatacgaggtcgccaacatcttcttctggaggccgtggttggcttgtatggagcagcagacgcgctacttcgagcggaggcatccggagcttgcaggatcgccgcggctccgggcgtatatgctccgcattggtcttgaccaactctatcagagcttggttgacggcaatttcgatgatgcagcttgggcgcagggtcgatgcgacgcaatcgtccgatccggagccgggactgtcgggcgtacacaaatcgcccgcagaagcgcggccgtctggaccgatggctgtgtagaagtactcgccgatagtggaaaccgacgccccagcactcgtccggatcgggagatgggggaggctaactgaaacacggaaggagacaataccggaaggaacccgcgctatgacggcaataaaaagacagaataaaacgcacgggtgttgggtcgtttgttcataaacgcggggttcggtcccagggctggcactctgtcgataccccaccgagaccccattggggccaatacgcccgcgtttcttccttttccccaccccaccccccaagttcgggtgaaggcccagggctcgcagccaacgtcggggcggcaggccctgccatagccactggccccgtgggttagggacggggtcccccatggggaatggtttatggttcgtgggggttattattttgggcgttgcgtggggtcaggtccacgactggactgagcagacagacccatggtttttggatggcctgggcatggaccgcatgtactggcgcgacacgaacaccgggcgtctgtggctgccaaacacccccgacccccaaaaaccaccgcgcggatttctggcgtgccaagctagtcgaccaattctcatgtttgacagcttatcatcgcagatccgggcaacgttgttgccattgctgcaggcgcagaactggtaggtatggaagatctatacattgaatcaatattggcaattagccatattagtcattggttatatagcataaatcaatattggctattggccattgcatacgttgtatctatatcataatatgtacatttatattggctcatgtccaatatgaccgccat

SEQ ID NO: 43 - DNA, 21594 bp, Artificial Sequence
  Vector with soluble s4-1BBL ectodomain construct
accaaacaaagttgggtaaggatagttcaatcaatgatcatcttctagtgcacttaggattcaagatcctattatcagggacaagagcaggattagggatatctcgaggcgcgtgccaccatgcccatggggtctctgcaaccgctggccaccttgtacctgctggggatgctggtcgcttcctgcctcggaggcgttcgactttgggctacaagacaggcaatgctgggccaggtccatgaggttcctgaggggtggctcattttcgtggccgagcaggaggagctgtatgttcgcgtgcaaaacggctttaggaaggtccagctggaagcgcggacacctttgcccaggggaaccgataacgagggctcacttgatcttcgacaagggatgtttgcacagctcgtagcacaaaacgttctgctcatcgacggccccttgtcctggtactcagacccaggattggccggtgtcagtcttaccggcggactcagctacaaggaggacactaaagagttggtcgtggcaaaggcaggcgtgtattatgtgttcttccaactggaactgaggagggttgtggccggtgaaggcagcggttccgtcagtttggcgctgcacctgcagcctttgaggagtgccgcaggtgctgctgcattggctctgactgtcgacctgccacctgcctcatccgaggctagaaattctgcctttggatttcaaggcagactgttgcatctgtcagcagggcagagacttggggtgcacctccatactgaggcaagagctagacacgcttggcagctcacccaaggggccactgttcttggactcttccgggtgacaccagagatacccgcaggactcccaagtccaaggagtgaaggcggtggcggaagcggtggaggtggatctggcggaggtggaagtcttgacctgcggcagggcatgttcgctcaattggtggcccagaatgttcttctgatcgatggtcctctgtcttggtattctgatcctggcttggcaggggtgtcacttactggtggtctttcatataaagaagacacaaaggagctcgtggtggctaaagctggagtttattacgtgttttttcaattggaactccggagagtggttgccggcgaaggttccggttctgtttctcttgctctgcacttgcaaccactgagaagtgctgcaggcgcagctgctttggctttgaccgtggatttgcctcctgcttcttccgaagccagaaacagcgcttttggctttcaaggaaggctcctgcatctctctgccggccaacgactgggagtgcatttgcacactgaagcacgcgcaagacatgcatggcagcttactcaaggagctacggtgctcggattgtttcgggtcacccctgagatacctgctgggctgcctagtcctagatcagaaggaggtggtggctctggtggaggaggttctggagggggaggaagcctggatctgcgacaaggcatgtttgcccagctcgttgcacaaaatgtgctgctgatcgacggacctctctcctggtattccgatcccgggttggctggagttagtctcacgggaggactgtcctacaaagaagatacgaaggaactcgtggtcgcaaaagctggggtttactacgtttttttccaacttgagctgcggagagttgtcgccggagaagggagcggatctgtatcattggcacttcaccttcagccgctcagatctgctgcaggtgccgctgcacttgctttgactgtggatctgcctccagcctcttctgaagcccgcaactctgcgtttggattccaagggagactgctccacctcagtgctggccaaagacttggagtccatctgcacacagaagcgagagccagacatgcctggcagctcactcagggggctactgtcctcggactgtttagagtcactccagaaataccagccggcctgccttcacctcgaagcgaataaacgcgccatccatcattgttataaaaaacttaggattcaagatcctattatcagggacaagagcaggattagggatatccgagatggccacacttttaaggagcttagcattgttcaaaagaaacaaggacaaaccacccattacatcaggatccggtggagccatcagaggaatcaaacacattattatagtaccaatccctggagattcctcaattaccactcgatccagacttctggaccggttggtcaggttaattggaaacccggatgtgagcgggcccaaactaacaggggcactaataggtatattatccttatttgtggagtctccaggtcaattgattcagaggatcaccgatgaccctgacgttagcataaggctgttagaggttgtccagagtgaccagtcacaatctggccttaccttcgcatcaagaggtaccaacatggaggatgaggcggaccaatacttttcacatgatgatccaattagtagtgatcaatccaggttcggatggttcgagaacaaggaaatctcagatattgaagtgcaagaccctgagggattcaacatgattctgggtaccatcctagcccaaatttgggtcttgctcgcaaaggcggttacggccccagacacggcagctgattcggagctaagaaggtggataaagtacacccaacaaagaagggtggttggtgaatttagattggagagaaaatggttggatgtggtgaggaacaggattgccgaggacctctccttacgccgattcatggtcgctctaatcctggatatcaagagaacacccggaaacaaacccaggattgctgaaatgatatgtgacattgatacatatatcgtagaggcaggattagccagttttatcctgactattaagtttgggatagaaactatgtatcctgctcttggactgcatgaatttgctggtgagttatccacacttgagtccttgatgaacctttaccagcaaatgggggaaactgcaccctacatggtaatcctggagaactcaattcagaacaagttcagtgcaggatcataccctctgctctggagctatgccatgggagtaggagtggaacttgaaaactccatgggaggtttgaactttggccgatcttactttgatccagcatattttagattagggcaagagatggtaaggaggtcagctggaaaggtcagttccacattggcatctgaactcggtatcactgccgaggatgcaaggcttgtttcagagattgcaatgcatactactgaggacaagatcagtagagcggttggacccagacaagcccaagtatcatttctacacggtgatcaaagtgagaatgagctaccgagattggggggcaaggaagataggagggtcaaacagagtcgaggagaagccagggagagctacagagaaaccgggcccagcagagcaagtgatgcgagagctgcccatcttccaaccggcacacccctagacattgacactgcaacggagtccagccaagatccgcaggacagtcgaaggtcagctgacgccctgcttaggctgcaagccatggcaggaatctcggaagaacaaggctcagacacggacacccctatagtgtacaatgacagaaatcttctagactaggtgcgagaggccgagggccagaacaacatccgcctaccctccatcattgttataaaaaacttaggaaccaggtccacacagccgccagcccatcaaccatccactcccacgattggagccaatggcagaagagcaggcacgccatgtcaaaaacggactggaatgcatccgggctctcaaggccgagcccatcggctcactggccatcgaggaagctatggcagcatggtcagaaatatcagacaacccaggacaggagcgagccacctgcagggaagagaaggcaggcagttcgggtctcagcaaaccatgcctctcagcaattggatcaactgaaggcggtgcacctcgcatccgcggtcagggacctggagagagcgatgacgacgctgaaactttgggaatccccccaagaaatctccaggcatcaagcactgggttacagtgttattacgtttatgatcacagcggtgaagcggttaagggaatccaagatgctgactctatcatggttcaatcaggccttgatggtgatagcaccctctcaggaggagacaatgaatctgaaaacagcgatgtggatattggcgaacctgataccgagggatatgctatcactgaccggggatctgctcccatctctatggggttcagggcttctgatgttgaaactgcagaaggaggggagatccacgagctcctgagactccaatccagaggcaacaactttccgaagcttgggaaaactctcaatgttcctccgcccccggaccccggtagggccagcacttccgggacacccattaaaaagggcacagacgcgagattagcctcatttggaacggagatcgcgtctttattgacaggtggtgcaacccaatgtgctcgaaagtcaccctcggaaccatcagggccaggtgcacctgcggggaatgtccccgagtgtgtgagcaatgccgcactgatacaggagtggacacccgaatctggtaccacaatctccccgagatcccagaataatgaagaagggggagactattatgatgatgagctgttctctgatgtccaagatattaaaacagccttggccaaaatacacgaggataatcagaagataatctccaagctagaatcactgctgttattgaagggagaagttgagtcaattaagaagcagatcaacaggcaaaatatcagcatatccaccctggaaggacacctctcaagcatcatgatcgccattcctggacttgggaaggatcccaacgaccccactgcagatgtcgaaatcaatcccgacttgaaacccatcataggcagagattcaggccgagcactggccgaagttctcaagaaacccgttgccagccgacaactccaaggaatgacaaatggacggaccagttccagaggacagctgctgaaggaatttcagctaaagccgatcgggaaaaagatgagctcagccgtcgggtttgttcctgacaccggccctgcatcacgcagtgtaatccgctccattataaaatccagccggctagaggaggatcggaagcgttacctgatgactctccttgatgatatcaaaggagccaatgatcttgccaagttccaccagatgctgatgaagataataatgaagtagctacagctcaacttacctgccaaccccatgccagtcgacccaactagtacaacctaaatccattataaaaaacttaggagcaaagtgattgcctcccaagttccacaatgacagagacctacgacttcgacaagtcggcatgggacatcaaagggtcgatcgctccgatacaacccaccacctacagtgatggcaggctggtgccccaggtcagagtcatagatcctggtctaggcgacaggaaggatgaatgctttatgtacatgtttctgctgggggttgttgaggacagcgattccctagggcctccaatcgggcgagcatttgggtccctgcccttaggtgttggcagatccacagcaaagcccgaaaaactcctcaaagaggccactgagcttgacatagttgttagacgtacagcagggctcaatgaaaaactggtgttctacaacaacaccccactaactctcctcacaccttggagaaaggtcctaacaacagggagtgtcttcaacgcaaaccaagtgtgcaatgcggttaatctgataccgctcgataccccgcagaggttccgtgttgtttatatgagcatcacccgtctttcggataacgggtattacaccgttcctagaagaatgctggaattcagatcggtcaatgcagtggccttcaacctgctggtgacccttaggattgacaaggcgataggccctgggaagatcatcgacaatacagagcaacttcctgaggcaacatttatggtccacatcgggaacttcaggagaaagaagagtgaagtctactctgccgattattgcaaaatgaaaatcgaaaagatgggcctggtttttgcacttggtgggatagggggcaccagtcttcacattagaagcacaggcaaaatgagcaagactctccatgcacaactcgggttcaagaagaccttatgttacccgctgatggatatcaatgaagaccttaatcgattactctggaggagcagatgcaagatagtaagaatccaggcagttttgcagccatcagttcctcaagaattccgcatttacgacgacgtgatcataaatgatgaccaaggactattcaaagttctgtagaccgtagtgcccagcaatgcccgaaaacgacccccctcacaatgacagccagaaggcccggacaaaaaagccccctccgaaagactccacggaccaagcgagaggccagccagcagccgacggcaagcgcgaacaccaggcggccccagcacagaacagccccgacacaaggccaccaccagccaccccaatctgcatcctcctcgtgggacccccgaggaccaacccccaaggctgcccccgatccaaaccaccaaccgcatccccaccacccccgggaaagaaacccccagcaattggaaggcccctccccctcttcctcaacacaagaactccacaaccgaaccgcacaagcgaccgaggtgacccaaccgcaggcatccgactccctagacagatcctctctccccggcaaactaaacaaaacttagggccaaggaacatacacacccaacagaacccagaccccggcccacggcgccgcgcccccaacccccgacaaccagagggagcccccaaccaatcccgccggctcccccggtgcccacaggcagggacaccaacccccgaacagacccagcacccaaccatcgacaatccaagacgggggggcccccccaaaaaaaggcccccaggggccgacagccagcaccgcgaggaagcccacccaccccacacacgaccacggcaaccaaaccagaacccagaccaccctgggccaccagctcccagactcggccatcaccccgcagaaaggaaaggccacaacccgcgcaccccagccccgatccggcggggagccacccaacccgaaccagcacccaagagcgatccccgaaggacccccgaaccgcaaaggacaccagtatcccacagcctctccaagtcccccggtctcctcctcttctcgaagggaccaaaagatcaatccaccacacccgacgacactcaactccccacccctaaaggagacaccgggaatcccagaatcaagactcatccaatgtccatcatgggtctcaaggtgaacgtctctgccatattcatggcagtactgttaactctccaaacacccaccggtcaaatccattggggcaatctctctaagataggggtggtaggaataggaagtgcaagctacaaagttatgactcgttccagccatcaatcattagtcataaaattaatgcccaatataactctcctcaataactgcacgagggtagagattgcagaatacaggagactactgagaacagttttggaaccaattagagatgcacttaatgcaatgacccagaatataagaccggttcagagtgtagcttcaagtaggagacacaagagatttgcgggagtagtcctggcaggtgcggccctaggcgttgccacagctgctcagataacagccggcattgcacttcaccagtccatgctgaactctcaagccatcgacaatctgagagcgagcctggaaactactaatcaggcaattgaggcaatcagacaagcagggcaggagatgatattggctgttcagggtgtccaagactacatcaataatgagctgataccgtctatgaaccaactatcttgtgatttaatcggccagaagctcgggctcaaattgctcagatactatacagaaatcctgtcattatttggccccagtttacgggaccccatatctgcggagatatctatccaggctttgagctatgcgcttggaggagacatcaataaggtgttagaaaagctcggatacagtggaggtgatttactgggcatcttagagagcggaggcatcaaggcccggataactcacgtcgacacagagtcctacttcattgtcctcagtatagcctatccgacgctgtccgagattaagggggtgattgtccaccggctagagggggtctcgtacaacataggctctcaagagtggtataccactgtgcccaagtatgttgcaacccaagggtaccttatctcgaattttgatgagtcatcgtgtactttcatgccagaggggactgtgtgcagccaaaatgccttgtacccgatgagtcctctgctccaagaatgcctccgggggtacaccaagtcctgtgctcgtacactcgtatccgggtcttttgggaaccggttcattttatcacaagggaacctaatagccaattgtgcatcaatcctttgcaagtgttacacaacaggaacgatcattaatcaagaccctgacaagatcctaacatacattgctgccgatcactgcccggtagtcgaggtgaacggcgtgatcatccaagtcgggagcaggaggtatccagacgctgtgtacttgcacagaattgacctcggtcctcccatatcattggagaggttggacgtagggacaaatctggggaatgcaattgctaagttggaggatgccaaggaattgttggagtcatcggaccagatattgaggagtatgaaaggtttatcgagcactagcatagtctacatcctgattgcagtgtgtcttggagggttgatagggatccccgctttaatatgttgctgcagggggcgttgtaacaaaaagggagaacaagttggtatgtcaagaccaggcctaaagcctgatcttacgggaacatcaaaatcctatgtaaggtcgctctgatcctctacaactcttgaaacacaaatgtcccacaagtctcctcttcgtcatcaagcaaccaccgcacccagcatcaagcccacctgaaattatctccggcttccctctggccgaacaatatcggtagttaattaaaacttagggtgcaagatcatccacaatgtcaccacaacgagaccggataaatgccttctacaaagataacccccatcccaagggaagtaggatagtcattaacagagaacatcttatgattgatagaccttatgttttgctggctgttctgtttgtcatgtttctgagcttgatcgggttgctagccattgcaggcattagacttcatcgggcagccatctacaccgcagagatccataaaagcctcagcaccaatctagatgtaactaactcaatcgagcatcaggtcaaggacgtgctgacaccactcttcaaaatcatcggtgatgaagtgggcctgaggacacctcagagattcactgacctagtgaaattcatctctgacaagatcaagttccttaatccggatagggagtacgacttcagagatctcacttggtgtatcaacccgccagagagaatcaaattggattatgatcaatactgtgcagatgtggctgctgaagagctcatgaatgcattggtgaactcaactctactggagaccagaacaaccaatcagttcctagctgtctcaaagggaaactgctcagggcccactacaatcagaggtcaattctcaaacatgtcgctgtccctgttagacttgtatttaggtcgaggttacaatgtgtcatctatagtcactatgacatcccagggaatgtatgggggaacttacctagtggaaaagcctaatctgagcagcaaaaggtcagagttgtcacaactgagcatgtaccgagtgtttgaagtaggtgttatcagaaatccgggtttgggggctccggtgttccatatgacaaactatcttgagcaaccagtcagtaatgatctcagcaactgtatggtggctttgggggagctcaaactcgcagccctttgtcacggggaagattctatcacaattccctatcagggatcagggaaaggtgtcagcttccagctcgtcaagctaggtgtctggaaatccccaaccgacatgcaatcctgggtccccttatcaacggatgatccagtgatagacaggctttacctctcatctcacagaggtgttatcgctgacaatcaagcaaaatgggctgtcccgacaacacgaacagatgacaagttgcgaatggagacatgcttccaacaggcgtgtaagggtaaaatccaagcactctgcgagaatcccgagtgggcaccattgaaggataacaggattccttcatacggggtcttgtctgttgatctgagtctgacagttgagcttaaaatcaaaattgcttcgggattcgggccattgatcacacacggttcagggatggacctatacaaatccaaccacaacaatgtgtattggctgactatcccgccaatgaagaacctagccttaggtgtaatcaacacattggagtggataccgagattcaaggttagtccctacctcttcactgtcccaattaaggaagcaggcgaagactgccatgccccaacatacctacctgcggaggtggatggtgatgtcaaactcagttccaatctggtgattctacctggtcaagatctccaatatgttttggcaacctacgatacttccagggttgaacatgctgtggtttattacgtttacagcccaagccgctcattttcttacttttatccttttaggttgcctataaagggggtccccatcgaattacaagtggaatgcttcacatgggaccaaaaactctggtgccgtcacttctgtgtgcttgcggactcagaatctggtggacatatcactcactctgggatggtgggcatgggagtcagctgcacagtcacccgggaagatggaaccaatcgcagatagggctgctagtgaaccaatcacatgatgtcacccagacatcaggcatacccactagtgtgaaatagacatcagaattaagaaaaacgtagggtccaagtggttccccgttatggactcgctatctgtcaaccagatcttataccctgaagttcacctagatagcccgatagttaccaataagatagtagccatcctggagtatgctcgagtccctcacgcttacagcctggaggaccctacactgtgtcagaacatcaagcaccgcctaaaaaacggattttccaaccaaatgattataaacaatgtggaagttgggaatgtcatcaagtccaagcttaggagttatccggcccactctcatattccatatccaaattgtaatcaggatttatttaacatagaagacaaagagtcaacgaggaagatccgtgaactcctcaaaaaggggaattcgctgtactccaaagtcagtgataaggttttccaatgcttaagggacactaactcacggcttggcctaggctccgaattgagggaggacatcaaggagaaagttattaacttgggagtttacatgcacagctcccagtggtttgagccctttctgttttggtttacagtcaagactgagatgaggtcagtgattaaatcacaaacccatacttgccataggaggagacacacacctgtattcttcactggtagttcagttgagttgctaatctctcgtgaccttgttgctataatcagtaaagagtctcaacatgtatattacctgacatttgaactggttttgatgtattgtgatgtcatagaggggaggttaatgacagagaccgctatgactattgatgctaggtatacagagcttctaggaagagtcagatacatgtggaaactgatagatggtttcttccctgcactcgggaatccaacttatcaaattgtagccatgctggagcctctttcacttgcttacctgcagctgagggatataacagtagaactcagaggtgctttccttaaccactgctttactgaaatacatgatgttcttgaccaaaacgggttttctgatgaaggtacttatcatgagttaattgaagctctagattacattttcataactgatgacatacatctgacaggggagattttctcatttttcagaagtttcggccaccccagacttgaagcagtaacggctgctgaaaatgttaggaaatacatgaatcagcctaaagtcattgtgtatgagactctgatgaaaggtcatgccatattttgtggaatcataatcaacggctatcgtgacaggcacggaggcagttggccaccgctgaccctccccctgcatgctgcagacacaatccggaatgctcaagcttcaggtgaagggttaacacatgagcagtgcgttgataactggaaatcttttgctggagtgaaatttggctgctttatgcctcttagcctggatagtgatctgacaatgtacctaaaggacaaggcacttgctgctctccaaagggaatgggattcagtttacccgaaagagttcctgcgttacgaccctcccaagggaaccgggtcacggaggcttgtagatgttttccttaatgattcgagctttgacccatatgatgtgataatgtatgttgtaagtggagcttacctccatgaccctgagttcaacctgtcttacagcctgaaagaaaaggagatcaaggaaacaggtagactttttgctaaaatgacttacaaaatgagggcatgccaagtgattgctgaaaatctaatctcaaacgggattggcaaatattttaaggacaatgggatggccaaggatgagcacgatttgactaaggcactccacactctagctgtctcaggagtccccaaagatctcaaagaaagtcacaggggggggccagtcttaaaaacctactcccgaagcccagtccacacaagtaccaggaacgtgagagcagcaaaagggtttatagggttccctcaagtaattcggcaggaccaagacactgatcatccggagaatatggaagcttacgagacagtcagtgcatttatcacgactgatctcaagaagtactgccttaattggagatatgagaccatcagcttgtttgcacagaggctaaatgagatttacggattgccctcatttttccagtggctgcataagaggcttgagacctctgtcctgtatgtaagtgaccctcattgcccccccgaccttgacgcccatatcccgttatataaagtccccaatgatcaaatcttcattaagtaccctatgggaggtatagaagggtattgtcagaagctgtggaccatcagcaccattccctatctatacctggctgcttatgagagcggagtaaggattgcttcgttagtgcaaggggacaatcagaccatagccgtaacaaaaagggtacccagcacatggccctacaaccttaagaaacgggaagctgctagagtaactagagattactttgtaattcttaggcaaaggctacatgatattggccatcacctcaaggcaaatgagacaattgtttcatcacatttttttgtctattcaaaaggaatatattatgatgggctacttgtgtcccaatcactcaagagcatcgcaagatgtgtattctggtcagagactatagttgatgaaacaagggcagcatgcagtaatattgctacaacaatggctaaaagcatcgagagaggttatgaccgttaccttgcatattccctgaacgtcctaaaagtgatacagcaaattctgatctctcttggcttcacaatcaattcaaccatgacccgggatgtagtcatacccctcctcacaaacaacgacctcttaataaggatggcactgttgcccgctcctattggggggatgaattatctgaatatgagcaggctgtttgtcagaaacatcggtgatccagtaacatcatcaattgctgatctcaagagaatgattctcgcctcactaatgcctgaagagaccctccatcaagtaatgacacaacaaccgggggactcttcattcctagactgggctagcgacccttactcagcaaatcttgtatgtgtccagagcatcactagactcctcaagaacataactgcaaggtttgtcctgatccatagtccaaacccaatgttaaaaggattattccatgatgacagtaaagaagaggacgagggactggcggcattcctcatggacaggcatattatagtacctagggcagctcatgaaatcctggatcatagtgtcacaggggcaagagagtctattgcaggcatgctggataccacaaaaggcttgattcgagccagcatgaggaagggggggttaacctctcgagtgataaccagattgtccaattatgactatgaacaattcagagcagggatggtgctattgacaggaagaaagcgaaatgtcctcattgacaaagagtcatgttcagtgcagctggcgagagctctaagaagccatatgtgggcgaggctagctcgaggacggcctatttacggccttgaggtccctgatgtactagaatctatgcgaggccaccttattcggcgtcatgagacatgtgtcatctgcgagtgtggatcagtcaactacggatggttttttgtcccctcgggttgccaactggatgatattgacaaggaaacatcatccttgagagtcccatatattggttctaccactgatgagagaacagacatgaagcttgccttcgtaagagccccaagtcgatccttgcgatctgctgttagaatagcaacagtgtactcatgggcttacggtgatgatgatagctcttggaacgaagcctggttgttggctaggcaaagggccaatgtgagcctggaggagctaagggtgatcactcccatctcaacttcgactaatttagcgcataggttgagggatcgtagcactcaagtgaaatactcaggtacatcccttgtccgagtggcgaggtataccacaatctccaacgacaatctctcatttgtcatatcagataagaaggttgatactaactttatataccaacaaggaatgcttctagggttgggtgttttagaaacattgtttcgactcgagaaagataccggatcatctaacacggtattacatcttcacgtcgaaacagattgttgcgtgatcccgatgatagatcatcccaggatacccagctcccgcaagctagagctgagggcagagctatgtaccaacccattgatatatgataatgcacctttaattgacagagatgcaacaaggctatacacccagagccataggaggcaccttgtggaatttgttacatggtccacaccccaactatatcacattttagctaagtccacagcactatctatgattgacctggtaacaaaatttgagaaggaccatatgaatgaaatttcagctctcataggggatgacgatatcaatagtttcataactgagtttctgctcatagagccaagattattcactatctacttgggccagtgtgcggccatcaattgggcatttgatgtacattatcatagaccatcagggaaatatcagatgggtgagctgttgtcatcgttcctttctagaatgagcaaaggagtgtttaaggtgcttgtcaatgctctaagccacccaaagatctacaagaaattctggcattgtggtattatagagcctatccatggtccttcacttgatgctcaaaacttgcacacaactgtgtgcaacatggtttacacatgctatatgacctacctcgacctgttgttgaatgaagagttagaagagttcacatttctcttgtgtgaaagcgacgaggatgtagtaccggacagattcgacaacatccaggcaaaacacttatgtgttctggcagatttgtactgtcaaccagggacctgcccaccaattcgaggtctaagaccggtagagaaatgtgcagttctaaccgaccatatcaaggcagaggctatgttatctccagcaggatcttcgtggaacataaatccaattattgtagaccattactcatgctctctgacttatctccggcgaggatcgatcaaacagataagattgagagttgatccaggattcattttcgacgccctcgctgaggtaaatgtcagtcagccaaagatcggcagcaacaacatctcaaatatgagcatcaaggctttcagacccccacacgatgatgttgcaaaattgctcaaagatatcaacacaagcaagcacaatcttcccatttcagggggcaatctcgccaattatgaaatccatgctttccgcagaatcgggttgaactcatctgcttgctacaaagctgttgagatatcaacattaattaggagatgccttgagccaggggaggacggcttgttcttgggtgagggatcgggttctatgttgatcacttataaggagatacttaaactaaacaagtgcttctataatagtggggtttccgccaattctagatctggtcaaagggaattagcaccctatccctccgaagttggccttgtcgaacacagaatgggagtaggtaatattgtcaaagtgctctttaacgggaggcccgaagtcacgtgggtaggcagtgtagattgcttcaatttcatagttagtaatatccctacctctagtgtggggtttatccattcagatatagagaccttgcctgacaaagatactatagagaagctagaggaattggcagccatcttatcgatggctctgctcctgggcaaaataggatcaatactggtgattaagcttatgcctttcagcggggattttgttcagggatttataagttatgtagggtctcattatagagaagtgaaccttgtataccctagatacagcaacttcatctctactgaatcttatttggttatgacagatctcaaggctaaccggctaatgaatcctgaaaagattaagcagcagataattgaatcatctgtgaggacttcacctggacttataggtcacatcctatccattaagcaactaagctgcatacaagcaattgtgggagacgcagttagtagaggtgatatcaatcctactctgaaaaaacttacacctatagagcaggtgctgatcaattgcgggttggcaattaacggacctaagctgtgcaaagaattgatccaccatgatgttgcctcagggcaagatggattgcttaattctatactcatcctctacagggagttggcaagattcaaagacaaccaaagaagtcaacaagggatgttccacgcttaccccgtattggtaagtagcaggcaacgagaacttatatctaggatcacccgcaaattctgggggcacattcttctttactccgggaacagaaagttgataaataagtttatccagaatctcaagtccggctatctgatactagacttacaccagaatatcttcgttaagaatctatccaagtcagagaaacagattattatgacggggggtttgaaacgtgagtgggtttttaaggtaacagtcaaggagaccaaagaatggtataagttagtcggatacagtgccctgattaaggactaattggttgaactccggaaccctaatcctgccctaggtggttaggcattatttgcaatatattaaagaaaactttgaaaatacgaagtttctattcccagctttgtctggtggccggcatggtcccagcctcctcgctggcgccggctgggcaacattccgaggggaccgtcccctcggtaatggcgaatgggacgcggccggtcgatcgacgatccggctgctaacaaagcccgaaaggaagctgagttggctgctgccaccgctgagcaataactagcataaccccttggggcctctaaacgggtcttgaggggttttttgctgaaaggaggaactatatccggatcgagatcaattctgtgagcgtatggcaaacgaaggaaaaatagttatagtagccgcactcgatgggacatttcaacgtaaaccgtttaataatattttgaatcttattccattatctgaaatggtggtaaaactaactgctgtgtgtatgaaatgctttaaggaggcttccttttctaaacgattgggtgaggaaaccgagatagaaataataggaggtaatgatatgtatcaatcggtgtgtagaaagtgttacatcgactcataatattatattttttatctaaaaaactaaaaataaacattgattaaattttaatataatacttaaaaatggatgttgtgtcgttagataaaccgtttatgtattttgaggaaattgataatgagttagattacgaaccagaaagtgcaaatgaggtcgcaaaaaaactgccgtatcaaggacagttaaaactattactaggagaattattttttcttagtaagttacagcgacacggtatattagatggtgccaccgtagtgtatataggatctgctcccggtacacatatacgttatttgagagatcatttctataatttaggagtgatcccgaaaggaagctgagttggctgctgccaccgctgagcaataactagcataaccccttggggcctctaaacgggtcttgaggggttttttgctgaaaggaggaacgcgcctgatgcggtattttctccttacgcatctgtgcggtatttcacaccgcatatatggtgcactctcagtacaatctgctctgatgccgcatagttaagccagccccgacacccgccaacacccgctgacgcgccctgacgggcttgtctgctcccggcatccgcttacagacaagctgtgaccgtctccgggagctgcatgtgtcagaggttttcaccgtcatcaccgaaacgcgcgagacgaaagggcctcgtgatacgcctatttttataggttaatgtcatgataataatggtttcttagacgtcaggtggcacttttcggggaaatgtgcgcggaacccctatttgtttatttttctaaatacattcaaatatgtatccgctcatgagacaataaccctgataaatgcttcaataatattgaaaaaggaagagtatgagtattcaacatttccgtgtcgcccttattcccttttttgcggcattttgccttcctgtttttgctcacccagaaacgctggtgaaagtaaaagatgctgaagatcagttgggtgcacgagtgggttacatcgaactggatctcaacagcggtaagatccttgagagttttcgccccgaagaacgttttccaatgatgagcacttttaaagttctgctatgtggcgcggtattatcccgtattgacgccgggcaagagcaactcggtcgccgcatacactattctcagaatgacttggttgagtactcaccagtcacagaaaagcatcttacggatggcatgacagtaagagaattatgcagtgctgccataaccatgagtgataacactgcggccaacttacttctgacaacgatcggaggaccgaaggagctaaccgcttttttgcacaacatgggggatcatgtaactcgccttgatcgttgggaaccggagctgaatgaagccataccaaacgacgagcgtgacaccacgatgcctgtagcaatggcaacaacgttgcgcaaactattaactggcgaactacttactctagcttcccggcaacaattaatagactggatggaggcggataaagttgcaggaccacttctgcgctcggcccttccggctggctggtttattgctgataaatctggagccggtgagcgtgggtctcgcggtatcattgcagcactggggccagatggtaagccctcccgtatcgtagttatctacacgacggggagtcaggcaactatggatgaacgaaatagacagatcgctgagataggtgcctcactgattaagcattggtaactgtcagaccaagtttactcatatatactttagattgatttaaaacttcatttttaatttaaaaggatctaggtgaagatcctttttgataatctcatgaccaaaatcccttaacgtgagttttcgttccactgagcgtcagaccccgtagaaaagatcaaaggatcttcttgagatcctttttttctgcgcgtaatctgctgcttgcaaacaaaaaaaccaccgctaccagcggtggtttgtttgccggatcaagagctaccaactctttttccgaaggtaactggcttcagcagagcgcagataccaaatactgtccttctagtgtagccgtagttaggccaccacttcaagaactctgtagcaccgcctacatacctcgctctgctaatcctgttaccagtggctgctgccagtggcgataagtcgtgtcttaccgggttggactcaagacgatagttaccggataaggcgcagcggtcgggctgaacggggggttcgtgcacacagcccagcttggagcgaacgacctacaccgaactgagatacctacagcgtgagcattgagaaagcgccacgcttcccgaagggagaaaggcggacaggtatccggtaagcggcagggtcggaacaggagagcgcacgagggagcttccagggggaaacgcctggtatctttatagtcctgtcgggtttcgccacctctgacttgagcgtcgatttttgtgatgctcgtcaggggggcggagcctatggaaaaacgccagcaacgcggcctttttacggttcctggccttttgctggccttttgctcacatgttctttcctgcgttatcccctgattctgtggataaccgtattaccgcctttgagtgagctgataccgctcgccgcagccgaacgaccgagcgcagcgagtcagtgagcgaggaagcggaagagcgcccaatacgcaaaccgcctctccccgcgcgttggccgattcattaatgcagctggcacgacaggtttcccgactggaaagcgggcagtgagcgcaacgcaattaatgtgagttagctcactcattaggcaccccaggctttacactttatgcttccggctcgtatgttgtgtggaattgtgagcggataacaatttcacacaggaaacagctatgaccatgattacgccaagcttacgcgtcctggcattatgcccagtacatgaccttatgggactttcctacttggcagtacatctacgtattagtcatcgctattaccatggtgatgcggttttggcagtacatcaatgggcgtggatagcggtttgactcacggggatttccaagtctccaccccattgacgtcaatgggagtttgttttggcaccaaaatcaacgggactttccaaaatgtcgtaacaactccgccccattgacgcaaatgggcggtaggcgtgtacggtgggaggtctatataagcagagctcgtttagtgaaccgtgg

SEQ ID NO: 44 - DNA, 21648 bp, Artificial Sequence
  Vector with soluble s4-1BBL ectodomain construct
accaaacaaagttgggtaaggatagttcaatcaatgatcatcttctagtgcacttaggattcaagatcctattatcagggacaagagcaggattagggatatctcgaggcgcgtgccaccatgcccatggggtctctgcaaccgctggccaccttgtacctgctggggatgctggtcgcttcctgcctcggatctggtgctggaggatcaggtggttctagtggaagtgatggtgctagcgggtctggcgttcgactttgggctacaagacaggcaatgctgggccaggtccatgaggttcctgaggggtggctcattttcgtggccgagcaggaggagctgtatgttcgcgtgcaaaacggctttaggaaggtccagctggaagcgcggacacctttgcccaggggaaccgataacgagggctcacttgatcttcgacaagggatgtttgcacagctcgtagcacaaaacgttctgctcatcgacggccccttgtcctggtactcagacccaggattggccggtgtcagtcttaccggcggactcagctacaaggaggacactaaagagttggtcgtggcaaaggcaggcgtgtattatgtgttcttccaactggaactgaggagggttgtggccggtgaaggcagcggttccgtcagtttggcgctgcacctgcagcctttgaggagtgccgcaggtgctgctgcattggctctgactgtcgacctgccacctgcctcatccgaggctagaaattctgcctttggatttcaaggcagactgttgcatctgtcagcagggcagagacttggggtgcacctccatactgaggcaagagctagacacgcttggcagctcacccaaggggccactgttcttggactcttccgggtgacaccagagatacccgcaggactcccaagtccaaggagtgaaggcggtggcggaagcggtggaggtggatctggcggaggtggaagtcttgacctgcggcagggcatgttcgctcaattggtggcccagaatgttcttctgatcgatggtcctctgtcttggtattctgatcctggcttggcaggggtgtcacttactggtggtctttcatataaagaagacacaaaggagctcgtggtggctaaagctggagtttattacgtgttttttcaattggaactccggagagtggttgccggcgaaggttccggttctgtttctcttgctctgcacttgcaaccactgagaagtgctgcaggcgcagctgctttggctttgaccgtggatttgcctcctgcttcttccgaagccagaaacagcgcttttggctttcaaggaaggctcctgcatctctctgccggccaacgactgggagtgcatttgcacactgaagcacgcgcaagacatgcatggcagcttactcaaggagctacggtgctcggattgtttcgggtcacccctgagatacctgctgggctgcctagtcctagatcagaaggaggtggtggctctggtggaggaggttctggagggggaggaagcctggatctgcgacaaggcatgtttgcccagctcgttgcacaaaatgtgctgctgatcgacggacctctctcctggtattccgatcccgggttggctggagttagtctcacgggaggactgtcctacaaagaagatacgaaggaactcgtggtcgcaaaagctggggtttactacgtttttttccaacttgagctgcggagagttgtcgccggagaagggagcggatctgtatcattggcacttcaccttcagccgctcagatctgctgcaggtgccgctgcacttgctttgactgtggatctgcctccagcctcttctgaagcccgcaactctgcgtttggattccaagggagactgctccacctcagtgctggccaaagacttggagtccatctgcacacagaagcgagagccagacatgcctggcagctcactcagggggctactgtcctcggactgtttagagtcactccagaaataccagccggcctgccttcacctcgaagcgaataaacgcgccatccatcattgttataaaaaacttaggattcaagatcctattatcagggacaagagcaggattagggatatccgagatggccacacttttaaggagcttagcattgttcaaaagaaacaaggacaaaccacccattacatcaggatccggtggagccatcagaggaatcaaacacattattatagtaccaatccctggagattcctcaattaccactcgatccagacttctggaccggttggtcaggttaattggaaacccggatgtgagcgggcccaaactaacaggggcactaataggtatattatccttatttgtggagtctccaggtcaattgattcagaggatcaccgatgaccctgacgttagcataaggctgttagaggttgtccagagtgaccagtcacaatctggccttaccttcgcatcaagaggtaccaacatggaggatgaggcggaccaatacttttcacatgatgatccaattagtagtgatcaatccaggttcggatggttcgagaacaaggaaatctcagatattgaagtgcaagaccctgagggattcaacatgattctgggtaccatcctagcccaaatttgggtcttgctcgcaaaggcggttacggccccagacacggcagctgattcggagctaagaaggtggataaagtacacccaacaaagaagggtggttggtgaatttagattggagagaaaatggttggatgtggtgaggaacaggattgccgaggacctctccttacgccgattcatggtcgctctaatcctggatatcaagagaacacccggaaacaaacccaggattgctgaaatgatatgtgacattgatacatatatcgtagaggcaggattagccagttttatcctgactattaagtttgggatagaaactatgtatcctgctcttggactgcatgaatttgctggtgagttatccacacttgagtccttgatgaacctttaccagcaaatgggggaaactgcaccctacatggtaatcctggagaactcaattcagaacaagttcagtgcaggatcataccctctgctctggagctatgccatgggagtaggagtggaacttgaaaactccatgggaggtttgaactttggccgatcttactttgatccagcatattttagattagggcaagagatggtaaggaggtcagctggaaaggtcagttccacattggcatctgaactcggtatcactgccgaggatgcaaggcttgtttcagagattgcaatgcatactactgaggacaagatcagtagagcggttggacccagacaagcccaagtatcatttctacacggtgatcaaagtgagaatgagctaccgagattggggggcaaggaagataggagggtcaaacagagtcgaggagaagccagggagagctacagagaaaccgggcccagcagagcaagtgatgcgagagctgcccatcttccaaccggcacacccctagacattgacactgcaacggagtccagccaagatccgcaggacagtcgaaggtcagctgacgccctgcttaggctgcaagccatggcaggaatctcggaagaacaaggctcagacacggacacccctatagtgtacaatgacagaaatcttctagactaggtgcgagaggccgagggccagaacaacatccgcctaccctccatcattgttataaaaaacttaggaaccaggtccacacagccgccagcccatcaaccatccactcccacgattggagccaatggcagaagagcaggcacgccatgtcaaaaacggactggaatgcatccgggctctcaaggccgagcccatcggctcactggccatcgaggaagctatggcagcatggtcagaaatatcagacaacccaggacaggagcgagccacctgcagggaagagaaggcaggcagttcgggtctcagcaaaccatgcctctcagcaattggatcaactgaaggcggtgcacctcgcatccgcggtcagggacctggagagagcgatgacgacgctgaaactttgggaatccccccaagaaatctccaggcatcaagcactgggttacagtgttattacgtttatgatcacagcggtgaagcggttaagggaatccaagatgctgactctatcatggttcaatcaggccttgatggtgatagcaccctctcaggaggagacaatgaatctgaaaacagcgatgtggatattggcgaacctgataccgagggatatgctatcactgaccggggatctgctcccatctctatggggttcagggcttctgatgttgaaactgcagaaggaggggagatccacgagctcctgagactccaatccagaggcaacaactttccgaagcttgggaaaactctcaatgttcctccgcccccggaccccggtagggccagcacttccgggacacccattaaaaagggcacagacgcgagattagcctcatttggaacggagatcgcgtctttattgacaggtggtgcaacccaatgtgctcgaaagtcaccctcggaaccatcagggccaggtgcacctgcggggaatgtccccgagtgtgtgagcaatgccgcactgatacaggagtggacacccgaatctggtaccacaatctccccgagatcccagaataatgaagaagggggagactattatgatgatgagctgttctctgatgtccaagatattaaaacagccttggccaaaatacacgaggataatcagaagataatctccaagctagaatcactgctgttattgaagggagaagttgagtcaattaagaagcagatcaacaggcaaaatatcagcatatccaccctggaaggacacctctcaagcatcatgatcgccattcctggacttgggaaggatcccaacgaccccactgcagatgtcgaaatcaatcccgacttgaaacccatcataggcagagattcaggccgagcactggccgaagttctcaagaaacccgttgccagccgacaactccaaggaatgacaaatggacggaccagttccagaggacagctgctgaaggaatttcagctaaagccgatcgggaaaaagatgagctcagccgtcgggtttgttcctgacaccggccctgcatcacgcagtgtaatccgctccattataaaatccagccggctagaggaggatcggaagcgttacctgatgactctccttgatgatatcaaaggagccaatgatcttgccaagttccaccagatgctgatgaagataataatgaagtagctacagctcaacttacctgccaaccccatgccagtcgacccaactagtacaacctaaatccattataaaaaacttaggagcaaagtgattgcctcccaagttccacaatgacagagacctacgacttcgacaagtcggcatgggacatcaaagggtcgatcgctccgatacaacccaccacctacagtgatggcaggctggtgccccaggtcagagtcatagatcctggtctaggcgacaggaaggatgaatgctttatgtacatgtttctgctgggggttgttgaggacagcgattccctagggcctccaatcgggcgagcatttgggtccctgcccttaggtgttggcagatccacagcaaagcccgaaaaactcctcaaagaggccactgagcttgacatagttgttagacgtacagcagggctcaatgaaaaactggtgttctacaacaacaccccactaactctcctcacaccttggagaaaggtcctaacaacagggagtgtcttcaacgcaaaccaagtgtgcaatgcggttaatctgataccgctcgataccccgcagaggttccgtgttgtttatatgagcatcacccgtctttcggataacgggtattacaccgttcctagaagaatgctggaattcagatcggtcaatgcagtggccttcaacctgctggtgacccttaggattgacaaggcgataggccctgggaagatcatcgacaatacagagcaacttcctgaggcaacatttatggtccacatcgggaacttcaggagaaagaagagtgaagtctactctgccgattattgcaaaatgaaaatcgaaaagatgggcctggtttttgcacttggtgggatagggggcaccagtcttcacattagaagcacaggcaaaatgagcaagactctccatgcacaactcgggttcaagaagaccttatgttacccgctgatggatatcaatgaagaccttaatcgattactctggaggagcagatgcaagatagtaagaatccaggcagttttgcagccatcagttcctcaagaattccgcatttacgacgacgtgatcataaatgatgaccaaggactattcaaagttctgtagaccgtagtgcccagcaatgcccgaaaacgacccccctcacaatgacagccagaaggcccggacaaaaaagccccctccgaaagactccacggaccaagcgagaggccagccagcagccgacggcaagcgcgaacaccaggcggccccagcacagaacagccccgacacaaggccaccaccagccaccccaatctgcatcctcctcgtgggacccccgaggaccaacccccaaggctgcccccgatccaaaccaccaaccgcatccccaccacccccgggaaagaaacccccagcaattggaaggcccctccccctcttcctcaacacaagaactccacaaccgaaccgcacaagcgaccgaggtgacccaaccgcaggcatccgactccctagacagatcctctctccccggcaaactaaacaaaacttagggccaaggaacatacacacccaacagaacccagaccccggcccacggcgccgcgcccccaacccccgacaaccagagggagcccccaaccaatcccgccggctcccccggtgcccacaggcagggacaccaacccccgaacagacccagcacccaaccatcgacaatccaagacgggggggcccccccaaaaaaaggcccccaggggccgacagccagcaccgcgaggaagcccacccaccccacacacgaccacggcaaccaaaccagaacccagaccaccctgggccaccagctcccagactcggccatcaccccgcagaaaggaaaggccacaacccgcgcaccccagccccgatccggcggggagccacccaacccgaaccagcacccaagagcgatccccgaaggacccccgaaccgcaaaggacaccagtatcccacagcctctccaagtcccccggtctcctcctcttctcgaagggaccaaaagatcaatccaccacacccgacgacactcaactccccacccctaaaggagacaccgggaatcccagaatcaagactcatccaatgtccatcatgggtctcaaggtgaacgtctctgccatattcatggcagtactgttaactctccaaacacccaccggtcaaatccattggggcaatctctctaagataggggtggtaggaataggaagtgcaagctacaaagttatgactcgttccagccatcaatcattagtcataaaattaatgcccaatataactctcctcaataactgcacgagggtagagattgcagaatacaggagactactgagaacagttttggaaccaattagagatgcacttaatgcaatgacccagaatataagaccggttcagagtgtagcttcaagtaggagacacaagagatttgcgggagtagtcctggcaggtgcggccctaggcgttgccacagctgctcagataacagccggcattgcacttcaccagtccatgctgaactctcaagccatcgacaatctgagagcgagcctggaaactactaatcaggcaattgaggcaatcagacaagcagggcaggagatgatattggctgttcagggtgtccaagactacatcaataatgagctgataccgtctatgaaccaactatcttgtgatttaatcggccagaagctcgggctcaaattgctcagatactatacagaaatcctgtcattatttggccccagtttacgggaccccatatctgcggagatatctatccaggctttgagctatgcgcttggaggagacatcaataaggtgttagaaaagctcggatacagtggaggtgatttactgggcatcttagagagcggaggcatcaaggcccggataactcacgtcgacacagagtcctacttcattgtcctcagtatagcctatccgacgctgtccgagattaagggggtgattgtccaccggctagagggggtctcgtacaacataggctctcaagagtggtataccactgtgcccaagtatgttgcaacccaagggtaccttatctcgaattttgatgagtcatcgtgtactttcatgccagaggggactgtgtgcagccaaaatgccttgtacccgatgagtcctctgctccaagaatgcctccgggggtacaccaagtcctgtgctcgtacactcgtatccgggtcttttgggaaccggttcattttatcacaagggaacctaatagccaattgtgcatcaatcctttgcaagtgttacacaacaggaacgatcattaatcaagaccctgacaagatcctaacatacattgctgccgatcactgcccggtagtcgaggtgaacggcgtgatcatccaagtcgggagcaggaggtatccagacgctgtgtacttgcacagaattgacctcggtcctcccatatcattggagaggttggacgtagggacaaatctggggaatgcaattgctaagttggaggatgccaaggaattgttggagtcatcggaccagatattgaggagtatgaaaggtttatcgagcactagcatagtctacatcctgattgcagtgtgtcttggagggttgatagggatccccgctttaatatgttgctgcagggggcgttgtaacaaaaagggagaacaagttggtatgtcaagaccaggcctaaagcctgatcttacgggaacatcaaaatcctatgtaaggtcgctctgatcctctacaactcttgaaacacaaatgtcccacaagtctcctcttcgtcatcaagcaaccaccgcacccagcatcaagcccacctgaaattatctccggcttccctctggccgaacaatatcggtagttaattaaaacttagggtgcaagatcatccacaatgtcaccacaacgagaccggataaatgccttctacaaagataacccccatcccaagggaagtaggatagtcattaacagagaacatcttatgattgatagaccttatgttttgctggctgttctgtttgtcatgtttctgagcttgatcgggttgctagccattgcaggcattagacttcatcgggcagccatctacaccgcagagatccataaaagcctcagcaccaatctagatgtaactaactcaatcgagcatcaggtcaaggacgtgctgacaccactcttcaaaatcatcggtgatgaagtgggcctgaggacacctcagagattcactgacctagtgaaattcatctctgacaagatcaagttccttaatccggatagggagtacgacttcagagatctcacttggtgtatcaacccgccagagagaatcaaattggattatgatcaatactgtgcagatgtggctgctgaagagctcatgaatgcattggtgaactcaactctactggagaccagaacaaccaatcagttcctagctgtctcaaagggaaactgctcagggcccactacaatcagaggtcaattctcaaacatgtcgctgtccctgttagacttgtatttaggtcgaggttacaatgtgtcatctatagtcactatgacatcccagggaatgtatgggggaacttacctagtggaaaagcctaatctgagcagcaaaaggtcagagttgtcacaactgagcatgtaccgagtgtttgaagtaggtgttatcagaaatccgggtttgggggctccggtgttccatatgacaaactatcttgagcaaccagtcagtaatgatctcagcaactgtatggtggctttgggggagctcaaactcgcagccctttgtcacggggaagattctatcacaattccctatcagggatcagggaaaggtgtcagcttccagctcgtcaagctaggtgtctggaaatccccaaccgacatgcaatcctgggtccccttatcaacggatgatccagtgatagacaggctttacctctcatctcacagaggtgttatcgctgacaatcaagcaaaatgggctgtcccgacaacacgaacagatgacaagttgcgaatggagacatgcttccaacaggcgtgtaagggtaaaatccaagcactctgcgagaatcccgagtgggcaccattgaaggataacaggattccttcatacggggtcttgtctgttgatctgagtctgacagttgagcttaaaatcaaaattgcttcgggattcgggccattgatcacacacggttcagggatggacctatacaaatccaaccacaacaatgtgtattggctgactatcccgccaatgaagaacctagccttaggtgtaatcaacacattggagtggataccgagattcaaggttagtccctacctcttcactgtcccaattaaggaagcaggcgaagactgccatgccccaacatacctacctgcggaggtggatggtgatgtcaaactcagttccaatctggtgattctacctggtcaagatctccaatatgttttggcaacctacgatacttccagggttgaacatgctgtggtttattacgtttacagcccaagccgctcattttcttacttttatccttttaggttgcctataaagggggtccccatcgaattacaagtggaatgcttcacatgggaccaaaaactctggtgccgtcacttctgtgtgcttgcggactcagaatctggtggacatatcactcactctgggatggtgggcatgggagtcagctgcacagtcacccgggaagatggaaccaatcgcagatagggctgctagtgaaccaatcacatgatgtcacccagacatcaggcatacccactagtgtgaaatagacatcagaattaagaaaaacgtagggtccaagtggttccccgttatggactcgctatctgtcaaccagatcttataccctgaagttcacctagatagcccgatagttaccaataagatagtagccatcctggagtatgctcgagtccctcacgcttacagcctggaggaccctacactgtgtcagaacatcaagcaccgcctaaaaaacggattttccaaccaaatgattataaacaatgtggaagttgggaatgtcatcaagtccaagcttaggagttatccggcccactctcatattccatatccaaattgtaatcaggatttatttaacatagaagacaaagagtcaacgaggaagatccgtgaactcctcaaaaaggggaattcgctgtactccaaagtcagtgataaggttttccaatgcttaagggacactaactcacggcttggcctaggctccgaattgagggaggacatcaaggagaaagttattaacttgggagtttacatgcacagctcccagtggtttgagccctttctgttttggtttacagtcaagactgagatgaggtcagtgattaaatcacaaacccatacttgccataggaggagacacacacctgtattcttcactggtagttcagttgagttgctaatctctcgtgaccttgttgctataatcagtaaagagtctcaacatgtatattacctgacatttgaactggttttgatgtattgtgatgtcatagaggggaggttaatgacagagaccgctatgactattgatgctaggtatacagagcttctaggaagagtcagatacatgtggaaactgatagatggtttcttccctgcactcgggaatccaacttatcaaattgtagccatgctggagcctctttcacttgcttacctgcagctgagggatataacagtagaactcagaggtgctttccttaaccactgctttactgaaatacatgatgttcttgaccaaaacgggttttctgatgaaggtacttatcatgagttaattgaagctctagattacattttcataactgatgacatacatctgacaggggagattttctcatttttcagaagtttcggccaccccagacttgaagcagtaacggctgctgaaaatgttaggaaatacatgaatcagcctaaagtcattgtgtatgagactctgatgaaaggtcatgccatattttgtggaatcataatcaacggctatcgtgacaggcacggaggcagttggccaccgctgaccctccccctgcatgctgcagacacaatccggaatgctcaagcttcaggtgaagggttaacacatgagcagtgcgttgataactggaaatcttttgctggagtgaaatttggctgctttatgcctcttagcctggatagtgatctgacaatgtacctaaaggacaaggcacttgctgctctccaaagggaatgggattcagtttacccgaaagagttcctgcgttacgaccctcccaagggaaccgggtcacggaggcttgtagatgttttccttaatgattcgagctttgacccatatgatgtgataatgtatgttgtaagtggagcttacctccatgaccctgagttcaacctgtcttacagcctgaaagaaaaggagatcaaggaaacaggtagactttttgctaaaatgacttacaaaatgagggcatgccaagtgattgctgaaaatctaatctcaaacgggattggcaaatattttaaggacaatgggatggccaaggatgagcacgatttgactaaggcactccacactctagctgtctcaggagtccccaaagatctcaaagaaagtcacaggggggggccagtcttaaaaacctactcccgaagcccagtccacacaagtaccaggaacgtgagagcagcaaaagggtttatagggttccctcaagtaattcggcaggaccaagacactgatcatccggagaatatggaagcttacgagacagtcagtgcatttatcacgactgatctcaagaagtactgccttaattggagatatgagaccatcagcttgtttgcacagaggctaaatgagatttacggattgccctcatttttccagtggctgcataagaggcttgagacctctgtcctgtatgtaagtgaccctcattgcccccccgaccttgacgcccatatcccgttatataaagtccccaatgatcaaatcttcattaagtaccctatgggaggtatagaagggtattgtcagaagctgtggaccatcagcaccattccctatctatacctggctgcttatgagagcggagtaaggattgcttcgttagtgcaaggggacaatcagaccatagccgtaacaaaaagggtacccagcacatggccctacaaccttaagaaacgggaagctgctagagtaactagagattactttgtaattcttaggcaaaggctacatgatattggccatcacctcaaggcaaatgagacaattgtttcatcacatttttttgtctattcaaaaggaatatattatgatgggctacttgtgtcccaatcactcaagagcatcgcaagatgtgtattctggtcagagactatagttgatgaaacaagggcagcatgcagtaatattgctacaacaatggctaaaagcatcgagagaggttatgaccgttaccttgcatattccctgaacgtcctaaaagtgatacagcaaattctgatctctcttggcttcacaatcaattcaaccatgacccgggatgtagtcatacccctcctcacaaacaacgacctcttaataaggatggcactgttgcccgctcctattggggggatgaattatctgaatatgagcaggctgtttgtcagaaacatcggtgatccagtaacatcatcaattgctgatctcaagagaatgattctcgcctcactaatgcctgaagagaccctccatcaagtaatgacacaacaaccgggggactcttcattcctagactgggctagcgacccttactcagcaaatcttgtatgtgtccagagcatcactagactcctcaagaacataactgcaaggtttgtcctgatccatagtccaaacccaatgttaaaaggattattccatgatgacagtaaagaagaggacgagggactggcggcattcctcatggacaggcatattatagtacctagggcagctcatgaaatcctggatcatagtgtcacaggggcaagagagtctattgcaggcatgctggataccacaaaaggcttgattcgagccagcatgaggaagggggggttaacctctcgagtgataaccagattgtccaattatgactatgaacaattcagagcagggatggtgctattgacaggaagaaagcgaaatgtcctcattgacaaagagtcatgttcagtgcagctggcgagagctctaagaagccatatgtgggcgaggctagctcgaggacggcctatttacggccttgaggtccctgatgtactagaatctatgcgaggccaccttattcggcgtcatgagacatgtgtcatctgcgagtgtggatcagtcaactacggatggttttttgtcccctcgggttgccaactggatgatattgacaaggaaacatcatccttgagagtcccatatattggttctaccactgatgagagaacagacatgaagcttgccttcgtaagagccccaagtcgatccttgcgatctgctgttagaatagcaacagtgtactcatgggcttacggtgatgatgatagctcttggaacgaagcctggttgttggctaggcaaagggccaatgtgagcctggaggagctaagggtgatcactcccatctcaacttcgactaatttagcgcataggttgagggatcgtagcactcaagtgaaatactcaggtacatcccttgtccgagtggcgaggtataccacaatctccaacgacaatctctcatttgtcatatcagataagaaggttgatactaactttatataccaacaaggaatgcttctagggttgggtgttttagaaacattgtttcgactcgagaaagataccggatcatctaacacggtattacatcttcacgtcgaaacagattgttgcgtgatcccgatgatagatcatcccaggatacccagctcccgcaagctagagctgagggcagagctatgtaccaacccattgatatatgataatgcacctttaattgacagagatgcaacaaggctatacacccagagccataggaggcaccttgtggaatttgttacatggtccacaccccaactatatcacattttagctaagtccacagcactatctatgattgacctggtaacaaaatttgagaaggaccatatgaatgaaatttcagctctcataggggatgacgatatcaatagtttcataactgagtttctgctcatagagccaagattattcactatctacttgggccagtgtgcggccatcaattgggcatttgatgtacattatcatagaccatcagggaaatatcagatgggtgagctgttgtcatcgttcctttctagaatgagcaaaggagtgtttaaggtgcttgtcaatgctctaagccacccaaagatctacaagaaattctggcattgtggtattatagagcctatccatggtccttcacttgatgctcaaaacttgcacacaactgtgtgcaacatggtttacacatgctatatgacctacctcgacctgttgttgaatgaagagttagaagagttcacatttctcttgtgtgaaagcgacgaggatgtagtaccggacagattcgacaacatccaggcaaaacacttatgtgttctggcagatttgtactgtcaaccagggacctgcccaccaattcgaggtctaagaccggtagagaaatgtgcagttctaaccgaccatatcaaggcagaggctatgttatctccagcaggatcttcgtggaacataaatccaattattgtagaccattactcatgctctctgacttatctccggcgaggatcgatcaaacagataagattgagagttgatccaggattcattttcgacgccctcgctgaggtaaatgtcagtcagccaaagatcggcagcaacaacatctcaaatatgagcatcaaggctttcagacccccacacgatgatgttgcaaaattgctcaaagatatcaacacaagcaagcacaatcttcccatttcagggggcaatctcgccaattatgaaatccatgctttccgcagaatcgggttgaactcatctgcttgctacaaagctgttgagatatcaacattaattaggagatgccttgagccaggggaggacggcttgttcttgggtgagggatcgggttctatgttgatcacttataaggagatacttaaactaaacaagtgcttctataatagtggggtttccgccaattctagatctggtcaaagggaattagcaccctatccctccgaagttggccttgtcgaacacagaatgggagtaggtaatattgtcaaagtgctctttaacgggaggcccgaagtcacgtgggtaggcagtgtagattgcttcaatttcatagttagtaatatccctacctctagtgtggggtttatccattcagatatagagaccttgcctgacaaagatactatagagaagctagaggaattggcagccatcttatcgatggctctgctcctgggcaaaataggatcaatactggtgattaagcttatgcctttcagcggggattttgttcagggatttataagttatgtagggtctcattatagagaagtgaaccttgtataccctagatacagcaacttcatctctactgaatcttatttggttatgacagatctcaaggctaaccggctaatgaatcctgaaaagattaagcagcagataattgaatcatctgtgaggacttcacctggacttataggtcacatcctatccattaagcaactaagctgcatacaagcaattgtgggagacgcagttagtagaggtgatatcaatcctactctgaaaaaacttacacctatagagcaggtgctgatcaattgcgggttggcaattaacggacctaagctgtgcaaagaattgatccaccatgatgttgcctcagggcaagatggattgcttaattctatactcatcctctacagggagttggcaagattcaaagacaaccaaagaagtcaacaagggatgttccacgcttaccccgtattggtaagtagcaggcaacgagaacttatatctaggatcacccgcaaattctgggggcacattcttctttactccgggaacagaaagttgataaataagtttatccagaatctcaagtccggctatctgatactagacttacaccagaatatcttcgttaagaatctatccaagtcagagaaacagattattatgacggggggtttgaaacgtgagtgggtttttaaggtaacagtcaaggagaccaaagaatggtataagttagtcggatacagtgccctgattaaggactaattggttgaactccggaaccctaatcctgccctaggtggttaggcattatttgcaatatattaaagaaaactttgaaaatacgaagtttctattcccagctttgtctggtggccggcatggtcccagcctcctcgctggcgccggctgggcaacattccgaggggaccgtcccctcggtaatggcgaatgggacgcggccggtcgatcgacgatccggctgctaacaaagcccgaaaggaagctgagttggctgctgccaccgctgagcaataactagcataaccccttggggcctctaaacgggtcttgaggggttttttgctgaaaggaggaactatatccggatcgagatcaattctgtgagcgtatggcaaacgaaggaaaaatagttatagtagccgcactcgatgggacatttcaacgtaaaccgtttaataatattttgaatcttattccattatctgaaatggtggtaaaactaactgctgtgtgtatgaaatgctttaaggaggcttccttttctaaacgattgggtgaggaaaccgagatagaaataataggaggtaatgatatgtatcaatcggtgtgtagaaagtgttacatcgactcataatattatattttttatctaaaaaactaaaaataaacattgattaaattttaatataatacttaaaaatggatgttgtgtcgttagataaaccgtttatgtattttgaggaaattgataatgagttagattacgaaccagaaagtgcaaatgaggtcgcaaaaaaactgccgtatcaaggacagttaaaactattactaggagaattattttttcttagtaagttacagcgacacggtatattagatggtgccaccgtagtgtatataggatctgctcccggtacacatatacgttatttgagagatcatttctataatttaggagtgatcccgaaaggaagctgagttggctgctgccaccgctgagcaataactagcataaccccttggggcctctaaacgggtcttgaggggttttttgctgaaaggaggaacgcgcctgatgcggtattttctccttacgcatctgtgcggtatttcacaccgcatatatggtgcactctcagtacaatctgctctgatgccgcatagttaagccagccccgacacccgccaacacccgctgacgcgccctgacgggcttgtctgctcccggcatccgcttacagacaagctgtgaccgtctccgggagctgcatgtgtcagaggttttcaccgtcatcaccgaaacgcgcgagacgaaagggcctcgtgatacgcctatttttataggttaatgtcatgataataatggtttcttagacgtcaggtggcacttttcggggaaatgtgcgcggaacccctatttgtttatttttctaaatacattcaaatatgtatccgctcatgagacaataaccctgataaatgcttcaataatattgaaaaaggaagagtatgagtattcaacatttccgtgtcgcccttattcccttttttgcggcattttgccttcctgtttttgctcacccagaaacgctggtgaaagtaaaagatgctgaagatcagttgggtgcacgagtgggttacatcgaactggatctcaacagcggtaagatccttgagagttttcgccccgaagaacgttttccaatgatgagcacttttaaagttctgctatgtggcgcggtattatcccgtattgacgccgggcaagagcaactcggtcgccgcatacactattctcagaatgacttggttgagtactcaccagtcacagaaaagcatcttacggatggcatgacagtaagagaattatgcagtgctgccataaccatgagtgataacactgcggccaacttacttctgacaacgatcggaggaccgaaggagctaaccgcttttttgcacaacatgggggatcatgtaactcgccttgatcgttgggaaccggagctgaatgaagccataccaaacgacgagcgtgacaccacgatgcctgtagcaatggcaacaacgttgcgcaaactattaactggcgaactacttactctagcttcccggcaacaattaatagactggatggaggcggataaagttgcaggaccacttctgcgctcggcccttccggctggctggtttattgctgataaatctggagccggtgagcgtgggtctcgcggtatcattgcagcactggggccagatggtaagccctcccgtatcgtagttatctacacgacggggagtcaggcaactatggatgaacgaaatagacagatcgctgagataggtgcctcactgattaagcattggtaactgtcagaccaagtttactcatatatactttagattgatttaaaacttcatttttaatttaaaaggatctaggtgaagatcctttttgataatctcatgaccaaaatcccttaacgtgagttttcgttccactgagcgtcagaccccgtagaaaagatcaaaggatcttcttgagatcctttttttctgcgcgtaatctgctgcttgcaaacaaaaaaaccaccgctaccagcggtggtttgtttgccggatcaagagctaccaactctttttccgaaggtaactggcttcagcagagcgcagataccaaatactgtccttctagtgtagccgtagttaggccaccacttcaagaactctgtagcaccgcctacatacctcgctctgctaatcctgttaccagtggctgctgccagtggcgataagtcgtgtcttaccgggttggactcaagacgatagttaccggataaggcgcagcggtcgggctgaacggggggttcgtgcacacagcccagcttggagcgaacgacctacaccgaactgagatacctacagcgtgagcattgagaaagcgccacgcttcccgaagggagaaaggcggacaggtatccggtaagcggcagggtcggaacaggagagcgcacgagggagcttccagggggaaacgcctggtatctttatagtcctgtcgggtttcgccacctctgacttgagcgtcgatttttgtgatgctcgtcaggggggcggagcctatggaaaaacgccagcaacgcggcctttttacggttcctggccttttgctggccttttgctcacatgttctttcctgcgttatcccctgattctgtggataaccgtattaccgcctttgagtgagctgataccgctcgccgcagccgaacgaccgagcgcagcgagtcagtgagcgaggaagcggaagagcgcccaatacgcaaaccgcctctccccgcgcgttggccgattcattaatgcagctggcacgacaggtttcccgactggaaagcgggcagtgagcgcaacgcaattaatgtgagttagctcactcattaggcaccccaggctttacactttatgcttccggctcgtatgttgtgtggaattgtgagcggataacaatttcacacaggaaacagctatgaccatgattacgccaagcttacgcgtcctggcattatgcccagtacatgaccttatgggactttcctacttggcagtacatctacgtattagtcatcgctattaccatggtgatgcggttttggcagtacatcaatgggcgtggatagcggtttgactcacggggatttccaagtctccaccccattgacgtcaatgggagtttgttttggcaccaaaatcaacgggactttccaaaatgtcgtaacaactccgccccattgacgcaaatgggcggtaggcgtgtacggtgggaggtctatataagcagagctcgtttagtgaaccgtgg

SEQ ID NO: 45 - DNA, 36352 bp, Artificial Sequence
  Vector with soluble s4-1BBL ectodomain construct
catcatcaataatataccttattttggattgaagccaatatgataatgagggggtggagtttgtgacgtggcgcggggcgtgggaacggggcgggtgacgtagtagtgtggcggaagtgtgatgttgcaagtgtggcggaacacatgtaagcgacggatgtggcaaaagtgacgtttttggtgtgcgccggtgtacacaggaagtgacaattttcgcgcggttttaggcggatgttgtagtaaatttgggcgtaaccgagtaagatttggccattttcgcgggaaaactgaataagaggaagtgaaatctgaataattttgtgttactcatagcgcgtaatatttgtctagggccgcggggactttgaccgtttacgtggagactcgcccaggtgtttttctcaggtgttttccgcgttccgggtcaaagttggcgttttattattatagtcagtcgaagcttggatccggtacctctagaattctcgagcggccgctagcgacatcggatctcccgatcccctatggtcgactctcagtacaatctgctctgatgccgcatagttaagccagtatctgctccctgcttgtgtgttggaggtcgctgagtagtgcgcgagcaaaatttaagctacaacaaggcaaggcttgaccgacaattgcatgaagaatctgcttagggttaggcgttttgcgctgcttcgcgatgtacgggccagatatacgcgttgacattgattattgactagttattaatagtaatcaattacggggtcattagttcatagcccatatatggagttccgcgttacataacttacggtaaatggcccgcctggctgaccgcccaacgacccccgcccattgacgtcaataatgacgtatgttcccatagtaacgccaatagggactttccattgacgtcaatgggtggactatttacggtaaactgcccacttggcagtacatcaagtgtatcatatgccaagtacgccccctattgacgtcaatgacggtaaatggcccgcctggcattatgcccagtacatgaccttatgggactttcctacttggcagtacatctacgtattagtcatcgctattaccatggtgatgcggttttggcagtacatcaatgggcgtggatagcggtttgactcacggggatttccaagtctccaccccattgacgtcaatgggagtttgttttggcaccaaaatcaacgggactttccaaaatgtcgtaacaactccgccccattgacgcaaatgggcggtaggcgtgtacggtgggaggtctatataagcagagctctctggctaactagagaacccactgcttactggcttatcgaaattaatacgactcactatagggagacccaagctggctagttaagctatcaacaagtttgtacaaaaaagcaggctgccaccatgcccatggggtctctgcaaccgctggccaccttgtacctgctggggatgctggtcgcttcctgcctcggaggcgttcgactttgggctacaagacaggcaatgctgggccaggtccatgaggttcctgaggggtggctcattttcgtggccgagcaggaggagctgtatgttcgcgtgcaaaacggctttaggaaggtccagctggaagcgcggacacctttgcccaggggaaccgataacgagggctcacttgatcttcgacaagggatgtttgcacagctcgtagcacaaaacgttctgctcatcgacggccccttgtcctggtactcagacccaggattggccggtgtcagtcttaccggcggactcagctacaaggaggacactaaagagttggtcgtggcaaaggcaggcgtgtattatgtgttcttccaactggaactgaggagggttgtggccggtgaaggcagcggttccgtcagtttggcgctgcacctgcagcctttgaggagtgccgcaggtgctgctgcattggctctgactgtcgacctgccacctgcctcatccgaggctagaaattctgcctttggatttcaaggcagactgttgcatctgtcagcagggcagagacttggggtgcacctccatactgaggcaagagctagacacgcttggcagctcacccaaggggccactgttcttggactcttccgggtgacaccagagatacccgcaggactcccaagtccaaggagtgaaggcggtggcggaagcggtggaggtggatctggcggaggtggaagtcttgacctgcggcagggcatgttcgctcaattggtggcccagaatgttcttctgatcgatggtcctctgtcttggtattctgatcctggcttggcaggggtgtcacttactggtggtctttcatataaagaagacacaaaggagctcgtggtggctaaagctggagtttattacgtgttttttcaattggaactccggagagtggttgccggcgaaggttccggttctgtttctcttgctctgcacttgcaaccactgagaagtgctgcaggcgcagctgctttggctttgaccgtggatttgcctcctgcttcttccgaagccagaaacagcgcttttggctttcaaggaaggctcctgcatctctctgccggccaacgactgggagtgcatttgcacactgaagcacgcgcaagacatgcatggcagcttactcaaggagctacggtgctcggattgtttcgggtcacccctgagatacctgctgggctgcctagtcctagatcagaaggaggtggtggctctggtggaggaggttctggagggggaggaagcctggatctgcgacaaggcatgtttgcccagctcgttgcacaaaatgtgctgctgatcgacggacctctctcctggtattccgatcccgggttggctggagttagtctcacgggaggactgtcctacaaagaagatacgaaggaactcgtggtcgcaaaagctggggtttactacgtttttttccaacttgagctgcggagagttgtcgccggagaagggagcggatctgtatcattggcacttcaccttcagccgctcagatctgctgcaggtgccgctgcacttgctttgactgtggatctgcctccagcctcttctgaagcccgcaactctgcgtttggattccaagggagactgctccacctcagtgctggccaaagacttggagtccatctgcacacagaagcgagagccagacatgcctggcagctcactcagggggctactgtcctcggactgtttagagtcactccagaaataccagccggcctgccttcacctcgaagcgaataaacccagctttcttgtacaaagtggttgatctagagggcccgcggttcgaaggtaagcctatccctaaccctctcctcggtctcgattctacgcgtaccggttagtaatgagtttaaacgggggaggctaactgaaacacggaaggagacaataccggaaggaacccgcgctatgacggcaataaaaagacagaataaaacgcacgggtgttgggtcgtttgttcataaacgcggggttcggtcccagggctggcactctgtcgataccccaccgagaccccattggggccaatacgcccgcgtttcttccttttccccaccccaccccccaagttcgggtgaaggcccagggctcgcagccaacgtcggggcggcaggccctgccatagcagatccgattcgacagatcactgaaatgtgtgggcgtggcttaagggtgggaaagaatatataaggtgggggtcttatgtagttttgtatctgttttgcagcagccgccgccgccatgagcaccaactcgtttgatggaagcattgtgagctcatatttgacaacgcgcatgcccccatgggccggggtgcgtcagaatgtgatgggctccagcattgatggtcgccccgtcctgcccgcaaactctactaccttgacctacgagaccgtgtctggaacgccgttggagactgcagcctccgccgccgcttcagccgctgcagccaccgcccgcgggattgtgactgactttgctttcctgagcccgcttgcaagcagtgcagcttcccgttcatccgcccgcgatgacaagttgacggctcttttggcacaattggattctttgacccgggaacttaatgtcgtttctcagcagctgttggatctgcgccagcaggtttctgccctgaaggcttcctcccctcccaatgcggtttaaaacataaataaaaaaccagactctgtttggatttggatcaagcaagtgtcttgctgtctttatttaggggttttgcgcgcgcggtaggcccgggaccagcggtctcggtcgttgagggtcctgtgtattttttccaggacgtggtaaaggtgactctggatgttcagatacatgggcataagcccgtctctggggtggaggtagcaccactgcagagcttcatgctgcggggtggtgttgtagatgatccagtcgtagcaggagcgctgggcgtggtgcctaaaaatgtctttcagtagcaagctgattgccaggggcaggcccttggtgtaagtgtttacaaagcggttaagctgggatgggtgcatacgtggggatatgagatgcatcttggactgtatttttaggttggctatgttcccagccatatccctccggggattcatgttgtgcagaaccaccagcacagtgtatccggtgcacttgggaaatttgtcatgtagcttagaaggaaatgcgtggaagaacttggagacgcccttgtgacctccaagattttccatgcattcgtccataatgatggcaatgggcccacgggcggcggcctgggcgaagatatttctgggatcactaacgtcatagttgtgttccaggatgagatcgtcataggccatttttacaaagcgcgggcggagggtgccagactgcggtataatggttccatccggcccaggggcgtagttaccctcacagatttgcatttcccacgctttgagttcagatggggggatcatgtctacctgcggggcgatgaagaaaacggtttccggggtaggggagatcagctgggaagaaagcaggttcctgagcagctgcgacttaccgcagccggtgggcccgtaaatcacacctattaccgggtgcaactggtagttaagagagctgcagctgccgtcatccctgagcaggggggccacttcgttaagcatgtccctgactcgcatgttttccctgaccaaatccgccagaaggcgctcgccgcccagcgatagcagttcttgcaaggaagcaaagtttttcaacggtttgagaccgtccgccgtaggcatgcttttgagcgtttgaccaagcagttccaggcggtcccacagctcggtcacctgctctacggcatctcgatccagcatatctcctcgtttcgcgggttggggcggctttcgctgtacggcagtagtcggtgctcgtccagacgggccagggtcatgtctttccacgggcgcagggtcctcgtcagcgtagtctgggtcacggtgaaggggtgcgctccgggctgcgcgctggccagggtgcgcttgaggctggtcctgctggtgctgaagcgctgccggtcttcgccctgcgcgtcggccaggtagcatttgaccatggtgtcatagtccagcccctccgcggcgtggcccttggcgcgcagcttgcccttggaggaggcgccgcacgaggggcagtgcagacttttgagggcgtagagcttgggcgcgagaaataccgattccggggagtaggcatccgcgccgcaggccccgcagacggtctcgcattccacgagccaggtgagctctggccgttcggggtcaaaaaccaggtttcccccatgctttttgatgcgtttcttacctctggtttccatgagccggtgtccacgctcggtgacgaaaaggctgtccgtgtccccgtatacagacttgagaggcctgtcctcgagcggtgttccgcggtcctcctcgtatagaaactcggaccactctgagacaaaggctcgcgtccaggccagcacgaaggaggctaagtgggaggggtagcggtcgttgtccactagggggtccactcgctccagggtgtgaagacacatgtcgccctcttcggcatcaaggaaggtgattggtttgtaggtgtaggccacgtgaccgggtgttcctgaaggggggctataaaagggggtgggggcgcgttcgtcctcactctcttccgcatcgctgtctgcgagggccagctgttggggtgagtactccctctgaaaagcgggcatgacttctgcgctaagattgtcagtttccaaaaacgaggaggatttgatattcacctggcccgcggtgatgcctttgagggtggccgcatccatctggtcagaaaagacaatctttttgttgtcaagcttggtggcaaacgacccgtagagggcgttggacagcaacttggcgatggagcgcagggtttggtttttgtcgcgatcggcgcgctccttggccgcgatgtttagctgcacgtattcgcgcgcaacgcaccgccattcgggaaagacggtggtgcgctcgtcgggcaccaggtgcacgcgccaaccgcggttgtgcagggtgacaaggtcaacgctggtggctacctctccgcgtaggcgctcgttggtccagcagaggcggccgcccttgcgcgagcagaatggcggtagggggtctagctgcgtctcgtccggggggtctgcgtccacggtaaagaccccgggcagcaggcgcgcgtcgaagtagtctatcttgcatccttgcaagtctagcgcctgctgccatgcgcgggcggcaagcgcgcgctcgtatgggttgagtgggggaccccatggcatggggtgggtgagcgcggaggcgtacatgccgcaaatgtcgtaaacgtagaggggctctctgagtattccaagatatgtagggtagcatcttccaccgcggatgctggcgcgcacgtaatcgtatagttcgtgcgagggagcgaggaggtcgggaccgaggttgctacgggcgggctgctctgctcggaagactatctgcctgaagatggcatgtgagttggatgatatggttggacgctggaagacgttgaagctggcgtctgtgagacctaccgcgtcacgcacgaaggaggcgtaggagtcgcgcagcttgttgaccagctcggcggtgacctgcacgtctagggcgcagtagtccagggtttccttgatgatgtcatacttatcctgtcccttttttttccacagctcgcggttgaggacaaactcttcgcggtctttccagtactcttggatcggaaacccgtcggcctccgaacggtaagagcctagcatgtagaactggttgacggcctggtaggcgcagcatcccttttctacgggtagcgcgtatgcctgcgcggccttccggagcgaggtgtgggtgagcgcaaaggtgtccctgaccatgactttgaggtactggtatttgaagtcagtgtcgtcgcatccgccctgctcccagagcaaaaagtccgtgcgctttttggaacgcggatttggcagggcgaaggtgacatcgttgaagagtatctttcccgcgcgaggcataaagttgcgtgtgatgcggaagggtcccggcacctcggaacggttgttaattacctgggcggcgagcacgatctcgtcaaagccgttgatgttgtggcccacaatgtaaagttccaagaagcgcgggatgcccttgatggaaggcaattttttaagttcctcgtaggtgagctcttcaggggagctgagcccgtgctctgaaagggcccagtctgcaagatgagggttggaagcgacgaatgagctccacaggtcacgggccattagcatttgcaggtggtcgcgaaaggtcctaaactggcgacctatggccattttttctggggtgatgcagtagaaggtaagcgggtcttgttcccagcggtcccatccaaggttcgcggctaggtctcgcgcggcagtcactagaggctcatctccgccgaacttcatgaccagcatgaagggcacgagctgcttcccaaaggcccccatccaagtataggtctctacatcgtaggtgacaaagagacgctcggtgcgaggatgcgagccgatcgggaagaactggatctcccgccaccaattggaggagtggctattgatgtggtgaaagtagaagtccctgcgacgggccgaacactcgtgctggcttttgtaaaaacgtgcgcagtactggcagcggtgcacgggctgtacatcctgcacgaggttgacctgacgaccgcgcacaaggaagcagagtgggaatttgagcccctcgcctggcgggtttggctggtggtcttctacttcggctgcttgtccttgaccgtctggctgctcgaggggagttacggtggatcggaccaccacgccgcgcgagcccaaagtccagatgtccgcgcgcggcggtcggagcttgatgacaacatcgcgcagatgggagctgtccatggtctggagctcccgcggcgtcaggtcaggcgggagctcctgcaggtttacctcgcatagacgggtcagggcgcgggctagatccaggtgatacctaatttccaggggctggttggtggcggcgtcgatggcttgcaagaggccgcatccccgcggcgcgactacggtaccgcgcggcgggcggtgggccgcgggggtgtccttggatgatgcatctaaaagcggtgacgcgggcgagcccccggaggtagggggggctccggacccgccgggagagggggcaggggcacgtcggcgccgcgcgcgggcaggagctggtgctgcgcgcgtaggttgctggcgaacgcgacgacgcggcggttgatctcctgaatctggcgcctctgcgtgaagacgacgggcccggtgagcttgagcctgaaagagagttcgacagaatcaatttcggtgtcgttgacggcggcctggcgcaaaatctcctgcacgtctcctgagttgtcttgataggcgatctcggccatgaactgctcgatctcttcctcctggagatctccgcgtccggctcgctccacggtggcggcgaggtcgttggaaatgcgggccatgagctgcgagaaggcgttgaggcctccctcgttccagacgcggctgtagaccacgcccccttcggcatcgcgggcgcgcatgaccacctgcgcgagattgagctccacgtgccgggcgaagacggcgtagtttcgcaggcgctgaaagaggtagttgagggtggtggcggtgtgttctgccacgaagaagtacataacccagcgtcgcaacgtggattcgttgatatcccccaaggcctcaaggcgctccatggcctcgtagaagtccacggcgaagttgaaaaactgggagttgcgcgccgacacggttaactcctcctccagaagacggatgagctcggcgacagtgtcgcgcacctcgcgctcaaaggctacaggggcctcttcttcttcttcaatctcctcttccataagggcctccccttcttcttcttctggcggcggtgggggaggggggacacggcggcgacgacggcgcaccgggaggcggtcgacaaagcgctcgatcatctccccgcggcgacggcgcatggtctcggtgacggcgcggccgttctcgcgggggcgcagttggaagacgccgcccgtcatgtcccggttatgggttggcggggggctgccatgcggcagggatacggcgctaacgatgcatctcaacaattgttgtgtaggtactccgccgccgagggacctgagcgagtccgcatcgaccggatcggaaaacctctcgagaaaggcgtctaaccagtcacagtcgcaaggtaggctgagcaccgtggcgggcggcagcgggcggcggtcggggttgtttctggcggaggtgctgctgatgatgtaattaaagtaggcggtcttgagacggcggatggtcgacagaagcaccatgtccttgggtccggcctgctgaatgcgcaggcggtcggccatgccccaggcttcgttttgacatcggcgcaggtctttgtagtagtcttgcatgagcctttctaccggcacttcttcttctccttcctcttgtcctgcatctcttgcatctatcgctgcggcggcggcggagtttggccgtaggtggcgccctcttcctcccatgcgtgtgaccccgaagcccctcatcggctgaagcagggctaggtcggcgacaacgcgctcggctaatatggcctgctgcacctgcgtgagggtagactggaagtcatccatgtccacaaagcggtggtatgcgcccgtgttgatggtgtaagtgcagttggccataacggaccagttaacggtctggtgacccggctgcgagagctcggtgtacctgagacgcgagtaagccctcgagtcaaatacgtagtcgttgcaagtccgcaccaggtactggtatcccaccaaaaagtgcggcggcggctggcggtagaggggccagcgtagggtggccggggctccgggggcgagatcttccaacataaggcgatgatatccgtagatgtacctggacatccaggtgatgccggcggcggtggtggaggcgcgcggaaagtcgcggacgcggttccagatgttgcgcagcggcaaaaagtgctccatggtcgggacgctctggccggtcaggcgcgcgcaatcgttgacgctctagaccgtgcaaaaggagagcctgtaagcgggcactcttccgtggtctggtggataaattcgcaagggtatcatggcggacgaccggggttcgagccccgtatccggccgtccgccgtgatccatgcggttaccgcccgcgtgtcgaacccaggtgtgcgacgtcagacaacgggggagtgctccttttggcttccttccaggcgcggcggctgctgcgctagcttttttggccactggccgcgcgcagcgtaagcggttaggctggaaagcgaaagcattaagtggctcgctccctgtagccggagggttattttccaagggttgagtcgcgggacccccggttcgagtctcggaccggccggactgcggcgaacgggggtttgcctccccgtcatgcaagaccccgcttgcaaattcctccggaaacagggacgagccccttttttgcttttcccagatgcatccggtgctgcggcagatgcgcccccctcctcagcagcggcaagagcaagagcagcggcagacatgcagggcaccctcccctcctcctaccgcgtcaggaggggcgacatccgcggttgacgcggcagcagatggtgattacgaacccccgcggcgccgggcccggcactacctggacttggaggagggcgagggcctggcgcggctaggagcgccctctcctgagcggtacccaagggtgcagctgaagcgtgatacgcgtgaggcgtacgtgccgcggcagaacctgtttcgcgaccgcgagggagaggagcccgaggagatgcgggatcgaaagttccacgcagggcgcgagctgcggcatggcctgaatcgcgagcggttgctgcgcgaggaggactttgagcccgacgcgcgaaccgggattagtcccgcgcgcgcacacgtggcggccgccgacctggtaaccgcatacgagcagacggtgaaccaggagattaactttcaaaaaagctttaacaaccacgtgcgtacgcttgtggcgcgcgaggaggtggctataggactgatgcatctgtgggactttgtaagcgcgctggagcaaaacccaaatagcaagccgctcatggcgcagctgttccttatagtgcagcacagcagggacaacgaggcattcagggatgcgctgctaaacatagtagagcccgagggccgctggctgctcgatttgataaacatcctgcagagcatagtggtgcaggagcgcagcttgagcctggctgacaaggtggccgccatcaactattccatgcttagcctgggcaagttttacgcccgcaagatataccataccccttacgttcccatagacaaggaggtaaagatcgaggggttctacatgcgcatggcgctgaaggtgcttaccttgagcgacgacctgggcgtttatcgcaacgagcgcatccacaaggccgtgagcgtgagccggcggcgcgagctcagcgaccgcgagctgatgcacagcctgcaaagggccctggctggcacgggcagcggcgatagagaggccgagtcctactttgacgcgggcgctgacctgcgctgggccccaagccgacgcgccctggaggcagctggggccggacctgggctggcggtggcacccgcgcgcgctggcaacgtcggcggcgtggaggaatatgacgaggacgatgagtacgagccagaggacggcgagtactaagcggtgatgtttctgatcagatgatgcaagacgcaacggacccggcggtgcgggcggcgctgcagagccagccgtccggccttaactccacggacgactggcgccaggtcatggaccgcatcatgtcgctgactgcgcgcaatcctgacgcgttccggcagcagccgcaggccaaccggctctccgcaattctggaagcggtggtcccggcgcgcgcaaaccccacgcacgagaaggtgctggcgatcgtaaacgcgctggccgaaaacagggccatccggcccgacgaggccggcctggtctacgacgcgctgcttcagcgcgtggctcgttacaacagcggcaacgtgcagaccaacctggaccggctggtgggggatgtgcgcgaggccgtggcgcagcgtgagcgcgcgcagcagcagggcaacctgggctccatggttgcactaaacgccttcctgagtacacagcccgccaacgtgccgcggggacaggaggactacaccaactttgtgagcgcactgcggctaatggtgactgagacaccgcaaagtgaggtgtaccagtctgggccagactattttttccagaccagtagacaaggcctgcagaccgtaaacctgagccaggctttcaaaaacttgcaggggctgtggggggtgcgggctcccacaggcgaccgcgcgaccgtgtctagcttgctgacgcccaactcgcgcctgttgctgctgctaatagcgcccttcacggacagtggcagcgtgtcccgggacacatacctaggtcacttgctgacactgtaccgcgaggccataggtcaggcgcatgtggacgagcatactttccaggagattacaagtgtcagccgcgcgctggggcaggaggacacgggcagcctggaggcaaccctaaactacctgctgaccaaccggcggcagaagatcccctcgttgcacagtttaaacagcgaggaggagcgcattttgcgctacgtgcagcagagcgtgagccttaacctgatgcgcgacggggtaacgcccagcgtggcgctggacatgaccgcgcgcaacatggaaccgggcatgtatgcctcaaaccggccgtttatcaaccgcctaatggactacttgcatcgcgcggccgccgtgaaccccgagtatttcaccaatgccatcttgaacccgcactggctaccgccccctggtttctacaccgggggattcgaggtgcccgagggtaacgatggattcctctgggacgacatagacgacagcgtgttttccccgcaaccgcagaccctgctagagttgcaacagcgcgagcaggcagaggcggcgctgcgaaaggaaagcttccgcaggccaagcagcttgtccgatctaggcgctgcggccccgcggtcagatgctagtagcccatttccaagcttgatagggtctcttaccagcactcgcaccacccgcccgcgcctgctgggcgaggaggagtacctaaacaactcgctgctgcagccgcagcgcgaaaaaaacctgcctccggcatttcccaacaacgggatagagagcctagtggacaagatgagtagatggaagacgtacgcgcaggagcacagggacgtgccaggcccgcgcccgcccacccgtcgtcaaaggcacgaccgtcagcggggtctggtgtgggaggacgatgactcggcagacgacagcagcgtcctggatttgggagggagtggcaacccgtttgcgcaccttcgccccaggctggggagaatgttttaaaaaaaaaaaagcatgatgcaaaataaaaaactcaccaaggccatggcaccgagcgttggttttcttgtattccccttagtatgcggcgcgcggcgatgtatgaggaaggtcctcctccctcctacgagagtgtggtgagcgcggcgccagtggcggcggcgctgggttctcccttcgatgctcccctggacccgccgtttgtgcctccgcggtacctgcggcctaccggggggagaaacagcatccgttactctgagttggcacccctattcgacaccacccgtgtgtacctggtggacaacaagtcaacggatgtggcatccctgaactaccagaacgaccacagcaactttctgaccacggtcattcaaaacaatgactacagcccgggggaggcaagcacacagaccatcaatcttgacgaccggtcgcactggggcggcgacctgaaaaccatcctgcataccaacatgccaaatgtgaacgagttcatgtttaccaataagtttaaggcgcgggtgatggtgtcgcgcttgcctactaaggacaatcaggtggagctgaaatacgagtgggtggagttcacgctgcccgagggcaactactccgagaccatgaccatagaccttatgaacaacgcgatcgtggagcactacttgaaagtgggcagacagaacggggttctggaaagcgacatcggggtaaagtttgacacccgcaacttcagactggggtttgaccccgtcactggtcttgtcatgcctggggtatatacaaacgaagccttccatccagacatcattttgctgccaggatgcggggtggacttcacccacagccgcctgagcaacttgttgggcatccgcaagcggcaacccttccaggagggctttaggatcacctacgatgatctggagggtggtaacattcccgcactgttggatgtggacgcctaccaggcgagcttgaaagatgacaccgaacagggcgggggtggcgcaggcggcagcaacagcagtggcagcggcgcggaagagaactccaacgcggcagccgcggcaatgcagccggtggaggacatgaacgatcatgccattcgcggcgacacctttgccacacgggctgaggagaagcgcgctgaggccgaagcagcggccgaagctgccgcccccgctgcgcaacccgaggtcgagaagcctcagaagaaaccggtgatcaaacccctgacagaggacagcaagaaacgcagttacaacctaataagcaatgacagcaccttcacccagtaccgcagctggtaccttgcatacaactacggcgaccctcagaccggaatccgctcatggaccctgctttgcactcctgacgtaacctgcggctcggagcaggtctactggtcgttgccagacatgatgcaagaccccgtgaccttccgctccacgcgccagatcagcaactttccggtggtgggcgccgagctgttgcccgtgcactccaagagcttctacaacgaccaggccgtctactcccaactcatccgccagtttacctctctgacccacgtgttcaatcgctttcccgagaaccagattttggcgcgcccgccagcccccaccatcaccaccgtcagtgaaaacgttcctgctctcacagatcacgggacgctaccgctgcgcaacagcatcggaggagtccagcgagtgaccattactgacgccagacgccgcacctgcccctacgtttacaaggccctgggcatagtctcgccgcgcgtcctatcgagccgcactttttgagcaagcatgtccatccttatatcgcccagcaataacacaggctggggcctgcgcttcccaagcaagatgtttggcggggccaagaagcgctccgaccaacacccagtgcgcgtgcgcgggcactaccgcgcgccctggggcgcgcacaaacgcggccgcactgggcgcaccaccgtcgatgacgccatcgacgcggtggtggaggaggcgcgcaactacacgcccacgccgccaccagtgtccacagtggacgcggccattcagaccgtggtgcgcggagcccggcgctatgctaaaatgaagagacggcggaggcgcgtagcacgtcgccaccgccgccgacccggcactgccgcccaacgcgcggcggcggccctgcttaaccgcgcacgtcgcaccggccgacgggcggccatgcgggccgctcgaaggctggccgcgggtattgtcactgtgccccccaggtccaggcgacgagcggccgccgcagcagccgcggccattagtgctatgactcagggtcgcaggggcaacgtgtattgggtgcgcgactcggttagcggcctgcgcgtgcccgtgcgcacccgccccccgcgcaactagattgcaagaaaaaactacttagactcgtactgttgtatgtatccagcggcggcggcgcgcaacgaagctatgtccaagcgcaaaatcaaagaagagatgctccaggtcatcgcgccggagatctatggccccccgaagaaggaagagcaggattacaagccccgaaagctaaagcgggtcaaaaagaaaaagaaagatgatgatgatgaacttgacgacgaggtggaactgctgcacgctaccgcgcccaggcgacgggtacagtggaaaggtcgacgcgtaaaacgtgttttgcgacccggcaccaccgtagtctttacgcccggtgagcgctccacccgcacctacaagcgcgtgtatgatgaggtgtacggcgacgaggacctgcttgagcaggccaacgagcgcctcggggagtttgcctacggaaagcggcataaggacatgctggcgttgccgctggacgagggcaacccaacacctagcctaaagcccgtaacactgcagcaggtgctgcccgcgcttgcaccgtccgaagaaaagcgcggcctaaagcgcgagtctggtgacttggcacccaccgtgcagctgatggtacccaagcgccagcgactggaagatgtcttggaaaaaatgaccgtggaacctgggctggagcccgaggtccgcgtgcggccaatcaagcaggtggcgccgggactgggcgtgcagaccgtggacgttcagatacccactaccagtagcaccagtattgccaccgccacagagggcatggagacacaaacgtccccggttgcctcagcggtggcggatgccgcggtgcaggcggtcgctgcggccgcgtccaagacctctacggaggtgcaaacggacccgtggatgtttcgcgtttcagccccccggcgcccgcgcggttcgaggaagtacggcgccgccagcgcgctactgcccgaatatgccctacatccttccattgcgcctacccccggctatcgtggctacacctaccgccccagaagacgagcaactacccgacgccgaaccaccactggaacccgccgccgccgtcgccgtcgccagcccgtgctggccccgatttccgtgcgcagggtggctcgcgaaggaggcaggaccctggtgctgccaacagcgcgctaccaccccagcatcgtttaaaagccggtctttgtggttcttgcagatatggccctcacctgccgcctccgtttcccggtgccgggattccgaggaagaatgcaccgtaggaggggcatggccggccacggcctgacgggcggcatgcgtcgtgcgcaccaccggcggcggcgcgcgtcgcaccgtcgcatgcgcggcggtatcctgcccctccttattccactgatcgccgcggcgattggcgccgtgcccggaattgcatccgtggccttgcaggcgcagagacactgattaaaaacaagttgcatgtggaaaaatcaaaataaaaagtctggactctcacgctcgcttggtcctgtaactattttgtagaatggaagacatcaactttgcgtctctggccccgcgacacggctcgcgcccgttcatgggaaactggcaagatatcggcaccagcaatatgagcggtggcgccttcagctggggctcgctgtggagcggcattaaaaatttcggttccaccgttaagaactatggcagcaaggcctggaacagcagcacaggccagatgctgagggataagttgaaagagcaaaatttccaacaaaaggtggtagatggcctggcctctggcattagcggggtggtggacctggccaaccaggcagtgcaaaataagattaacagtaagcttgatccccgccctcccgtagaggagcctccaccggccgtggagacagtgtctccagaggggcgtggcgaaaagcgtccgcgccccgacagggaagaaactctggtgacgcaaatagacgagcctccctcgtacgaggaggcactaaagcaaggcctgcccaccacccgtcccatcgcgcccatggctaccggagtgctgggccagcacacacccgtaacgctggacctgcctccccccgccgacacccagcagaaacctgtgctgccaggcccgaccgccgttgttgtaacccgtcctagccgcgcgtccctgcgccgcgccgccagcggtccgcgatcgttgcggcccgtagccagtggcaactggcaaagcacactgaacagcatcgtgggtctgggggtgcaatccctgaagcgccgacgatgcttctgaatagctaacgtgtcgtatgtgtgtcatgtatgcgtccatgtcgccgccagaggagctgctgagccgccgcgcgcccgctttccaagatggctaccccttcgatgatgccgcagtggtcttacatgcacatctcgggccaggacgcctcggagtacctgagccccgggctggtgcagtttgcccgcgccaccgagacgtacttcagcctgaataacaagtttagaaaccccacggtggcgcctacgcacgacgtgaccacagaccggtcccagcgtttgacgctgcggttcatccctgtggaccgtgaggatactgcgtactcgtacaaggcgcggttcaccctagctgtgggtgataaccgtgtgctggacatggcttccacgtactttgacatccgcggcgtgctggacaggggccctacttttaagccctactctggcactgcctacaacgccctggctcccaagggtgccccaaatccttgcgaatgggatgaagctgctactgctcttgaaataaacctagaagaagaggacgatgacaacgaagacgaagtagacgagcaagctgagcagcaaaaaactcacgtatttgggcaggcgccttattctggtataaatattacaaaggagggtattcaaataggtgtcgaaggtcaaacacctaaatatgccgataaaacatttcaacctgaacctcaaataggagaatctcagtggtacgaaactgaaattaatcatgcagctgggagagtccttaaaaagactaccccaatgaaaccatgttacggttcatatgcaaaacccacaaatgaaaatggagggcaaggcattcttgtaaagcaacaaaatggaaagctagaaagtcaagtggaaatgcaatttttctcaactactgaggcgaccgcaggcaatggtgataacttgactcctaaagtggtattgtacagtgaagatgtagatatagaaaccccagacactcatatttcttacatgcccactattaaggaaggtaactcacgagaactaatgggccaacaatctatgcccaacaggcctaattacattgcttttagggacaattttattggtctaatgtattacaacagcacgggtaatatgggtgttctggcgggccaagcatcgcagttgaatgctgttgtagatttgcaagacagaaacacagagctttcataccagcttttgcttgattccattggtgatagaaccaggtacttttctatgtggaatcaggctgttgacagctatgatccagatgttagaattattgaaaatcatggaactgaagatgaacttccaaattactgctttccactgggaggtgtgattaatacagagactcttaccaaggtaaaacctaaaacaggtcaggaaaatggatgggaaaaagatgctacagaattttcagataaaaatgaaataagagttggaaataattttgccatggaaatcaatctaaatgccaacctgtggagaaatttcctgtactccaacatagcgctgtatttgcccgacaagctaaagtacagtccttccaacgtaaaaatttctgataacccaaacacctacgactacatgaacaagcgagtggtggctcccgggttagtggactgctacattaaccttggagcacgctggtcccttgactatatggacaacgtcaacccatttaaccaccaccgcaatgctggcctgcgctaccgctcaatgttgctgggcaatggtcgctatgtgcccttccacatccaggtgcctcagaagttctttgccattaaaaacctccttctcctgccgggctcatacacctacgagtggaacttcaggaaggatgttaacatggttctgcagagctccctaggaaatgacctaagggttgacggagccagcattaagtttgatagcatttgcctttacgccaccttcttccccatggcccacaacaccgcctccacgcttgaggccatgcttagaaacgacaccaacgaccagtcctttaacgactatctctccgccgccaacatgctctaccctatacccgccaacgctaccaacgtgcccatatccatcccctcccgcaactgggcggctttccgcggctgggccttcacgcgccttaagactaaggaaaccccatcactgggctcgggctacgacccttattacacctactctggctctataccctacctagatggaaccttttacctcaaccacacctttaagaaggtggccattacctttgactcttctgtcagctggcctggcaatgaccgcctgcttacccccaacgagtttgaaattaagcgctcagttgacggggagggttacaacgttgcccagtgtaacatgaccaaagactggttcctggtacaaatgctagctaactacaacattggctaccagggcttctatatcccagagagctacaaggaccgcatgtactccttctttagaaacttccagcccatgagccgtcaggtggtggatgatactaaatacaaggactaccaacaggtgggcatcctacaccaacacaacaactctggatttgttggctaccttgcccccaccatgcgcgaaggacaggcctaccctgctaacttcccctatccgcttataggcaagaccgcagttgacagcattacccagaaaaagtttctttgcgatcgcaccctttggcgcatcccattctccagtaactttatgtccatgggcgcactcacagacctgggccaaaaccttctctacgccaactccgcccacgcgctagacatgacttttgaggtggatcccatggacgagcccacccttctttatgttttgtttgaagtctttgacgtggtccgtgtgcaccggccgcaccgcggcgtcatcgaaaccgtgtacctgcgcacgcccttctcggccggcaacgccacaacataaagaagcaagcaacatcaacaacagctgccgccatgggctccagtgagcaggaactgaaagccattgtcaaagatcttggttgtgggccatattttttgggcacctatgacaagcgctttccaggctttgtttctccacacaagctcgcctgcgccatagtcaatacggccggtcgcgagactgggggcgtacactggatggcctttgcctggaacccgcactcaaaaacatgctacctctttgagccctttggcttttctgaccagcgactcaagcaggtttaccagtttgagtacgagtcactcctgcgccgtagcgccattgcttcttcccccgaccgctgtataacgctggaaaagtccacccaaagcgtacaggggcccaactcggccgcctgtggactattctgctgcatgtttctccacgcctttgccaactggccccaaactcccatggatcacaaccccaccatgaaccttattaccggggtacccaactccatgctcaacagtccccaggtacagcccaccctgcgtcgcaaccaggaacagctctacagcttcctggagcgccactcgccctacttccgcagccacagtgcgcagattaggagcgccacttctttttgtcacttgaaaaacatgtaaaaataatgtactagagacactttcaataaaggcaaatgcttttatttgtacactctcgggtgattatttacccccacccttgccgtctgcgccgtttaaaaatcaaaggggttctgccgcgcatcgctatgcgccactggcagggacacgttgcgatactggtgtttagtgctccacttaaactcaggcacaaccatccgcggcagctcggtgaagttttcactccacaggctgcgcaccatcaccaacgcgtttagcaggtcgggcgccgatatcttgaagtcgcagttggggcctccgccctgcgcgcgcgagttgcgatacacagggttgcagcactggaacactatcagcgccgggtggtgcacgctggccagcacgctcttgtcggagatcagatccgcgtccaggtcctccgcgttgctcagggcgaacggagtcaactttggtagctgccttcccaaaaagggcgcgtgcccaggctttgagttgcactcgcaccgtagtggcatcaaaaggtgaccgtgcccggtctgggcgttaggatacagcgcctgcataaaagccttgatctgcttaaaagccacctgagcctttgcgccttcagagaagaacatgccgcaagacttgccggaaaactgattggccggacaggccgcgtcgtgcacgcagcaccttgcgtcggtgttggagatctgcaccacatttcggccccaccggttcttcacgatcttggccttgctagactgctccttcagcgcgcgctgcccgttttcgctcgtcacatccatttcaatcacgtgctccttatttatcataatgcttccgtgtagacacttaagctcgccttcgatctcagcgcagcggtgcagccacaacgcgcagcccgtgggctcgtgatgcttgtaggtcacctctgcaaacgactgcaggtacgcctgcaggaatcgccccatcatcgtcacaaaggtcttgttgctggtgaaggtcagctgcaacccgcggtgctcctcgttcagccaggtcttgcatacggccgccagagcttccacttggtcaggcagtagtttgaagttcgcctttagatcgttatccacgtggtacttgtccatcagcgcgcgcgcagcctccatgcccttctcccacgcagacacgatcggcacactcagcgggttcatcaccgtaatttcactttccgcttcgctgggctcttcctcttcctcttgcgtccgcataccacgcgccactgggtcgtcttcattcagccgccgcactgtgcgcttacctcctttgccatgcttgattagcaccggtgggttgctgaaacccaccatttgtagcgccacatcttctctttcttcctcgctgtccacgattacctctggtgatggcgggcgctcgggcttgggagaagggcgcttctttttcttcttgggcgcaatggccaaatccgccgccgaggtcgatggccgcgggctgggtgtgcgcggcaccagcgcgtcttgtgatgagtcttcctcgtcctcggactcgatacgccgcctcatccgcttttttgggggcgcccggggaggcggcggcgacggggacggggacgacacgtcctccatggttgggggacgtcgcgccgcaccgcgtccgcgctcgggggtggtttcgcgctgctcctcttcccgactggccatttccttctcctataggcagaaaaagatcatggagtcagtcgagaagaaggacagcctaaccgccccctctgagttcgccaccaccgcctccaccgatgccgccaacgcgcctaccaccttccccgtcgaggcacccccgcttgaggaggaggaagtgattatcgagcaggacccaggttttgtaagcgaagacgacgaggaccgctcagtaccaacagaggataaaaagcaagaccaggacaacgcagaggcaaacgaggaacaagtcgggcggggggacgaaaggcatggcgactacctagatgtgggagacgacgtgctgttgaagcatctgcagcgccagtgcgccattatctgcgacgcgttgcaagagcgcagcgatgtgcccctcgccatagcggatgtcagccttgcctacgaacgccacctattctcaccgcgcgtaccccccaaacgccaagaaaacggcacatgcgagcccaacccgcgcctcaacttctaccccgtatttgccgtgccagaggtgcttgccacctatcacatctttttccaaaactgcaagatacccctatcctgccgtgccaaccgcagccgagcggacaagcagctggccttgcggcagggcgctgtcatacctgatatcgcctcgctcaacgaagtgccaaaaatctttgagggtcttggacgcgacgagaagcgcgcggcaaacgctctgcaacaggaaaacagcgaaaatgaaagtcactctggagtgttggtggaactcgagggtgacaacgcgcgcctagccgtactaaaacgcagcatcgaggtcacccactttgcctacccggcacttaacctaccccccaaggtcatgagcacagtcatgagtgagctgatcgtgcgccgtgcgcagcccctggagagggatgcaaatttgcaagaacaaacagaggagggcctacccgcagttggcgacgagcagctagcgcgctggcttcaaacgcgcgagcctgccgacttggaggagcgacgcaaactaatgatggccgcagtgctcgttaccgtggagcttgagtgcatgcagcggttctttgctgacccggagatgcagcgcaagctagaggaaacattgcactacacctttcgacagggctacgtacgccaggcctgcaagatctccaacgtggagctctgcaacctggtctcctaccttggaattttgcacgaaaaccgccttgggcaaaacgtgcttcattccacgctcaagggcgaggcgcgccgcgactacgtccgcgactgcgtttacttatttctatgctacacctggcagacggccatgggcgtttggcagcagtgcttggaggagtgcaacctcaaggagctgcagaaactgctaaagcaaaacttgaaggacctatggacggccttcaacgagcgctccgtggccgcgcacctggcggacatcattttccccgaacgcctgcttaaaaccctgcaacagggtctgccagacttcaccagtcaaagcatgttgcagaactttaggaactttatcctagagcgctcaggaatcttgcccgccacctgctgtgcacttcctagcgactttgtgcccattaagtaccgcgaatgccctccgccgctttggggccactgctaccttctgcagctagccaactaccttgcctaccactctgacataatggaagacgtgagcggtgacggtctactggagtgtcactgtcgctgcaacctatgcaccccgcaccgctccctggtttgcaattcgcagctgcttaacgaaagtcaaattatcggtacctttgagctgcagggtccctcgcctgacgaaaagtccgcggctccggggttgaaactcactccggggctgtggacgtcggcttaccttcgcaaatttgtacctgaggactaccacgcccacgagattaggttctacgaagaccaatcccgcccgccaaatgcggagcttaccgcctgcgtcattacccagggccacattcttggccaattgcaagccatcaacaaagcccgccaagagtttctgctacgaaagggacggggggtttacttggacccccagtccggcgaggagctcaacccaatccccccgccgccgcagccctatcagcagcagccgcgggcccttgcttcccaggatggcacccaaaaagaagctgcagctgccgccgccacccacggacgaggaggaatactgggacagtcaggcagaggaggttttggacgaggaggaggaggacatgatggaagactgggagagcctagacgaggaagcttccgaggtcgaagaggtgtcagacgaaacaccgtcaccctcggtcgcattcccctcgccggcgccccagaaatcggcaaccggttccagcatggctacaacctccgctcctcaggcgccgccggcactgcccgttcgccgacccaaccgtagatgggacaccactggaaccagggccggtaagtccaagcagccgccgccgttagcccaagagcaacaacagcgccaaggctaccgctcatggcgcgggcacaagaacgccatagttgcttgcttgcaagactgtgggggcaacatctccttcgcccgccgctttcttctctaccatcacggcgtggccttcccccgtaacatcctgcattactaccgtcatctctacagcccatactgcaccggcggcagcggcagcggcagcaacagcagcggccacacagaagcaaaggcgaccggatagcaagactctgacaaagcccaagaaatccacagcggcggcagcagcaggaggaggagcgctgcgtctggcgcccaacgaacccgtatcgacccgcgagcttagaaacaggatttttcccactctgtatgctatatttcaacagagcaggggccaagaacaagagctgaaaataaaaaacaggtctctgcgatccctcacccgcagctgcctgtatcacaaaagcgaagatcagcttcggcgcacgctggaagacgcggaggctctcttcagtaaatactgcgcgctgactcttaaggactagtttcgcgccctttctcaaatttaagcgcgaaaactacgtcatctccagcggccacacccggcgccagcacctgtcgtcagcgccattatgagcaaggaaattcccacgccctacatgtggagttaccagccacaaatgggacttgcggctggagctgcccaagactactcaacccgaataaactacatgagcgcgggaccccacatgatatcccgggtcaacggaatccgcgcccaccgaaaccgaattctcttggaacaggcggctattaccaccacacctcgtaataaccttaatccccgtagttggcccgctgccctggtgtaccaggaaagtcccgctcccaccactgtggtacttcccagagacgcccaggccgaagttcagatgactaactcaggggcgcagcttgcgggcggctttcgtcacagggtgcggtcgcccgggcagggtataactcacctgacaatcagagggcgaggtattcagctcaacgacgagtcggtgagctcctcgcttggtctccgtccggacgggacatttcagatcggcggcgccggccgtccttcattcacgcctcgtcaggcaatcctaactctgcagacctcgtcctctgagccgcgctctggaggcattggaactctgcaatttattgaggagtttgtgccatcggtctactttaaccccttctcgggacctcccggccactatccggatcaatttattcctaactttgacgcggtaaaggactcggcggacggctacgactgaatgttaagtggagaggcagagcaactgcgcctgaaacacctggtccactgtcgccgccacaagtgctttgcccgcgactccggtgagttttgctactttgaattgcccgaggatcatatcgagggcccggcgcacggcgtccggcttaccgcccagggagagcttgcccgtagcctgattcgggagtttacccagcgccccctgctagttgagcgggacaggggaccctgtgttctcactgtgatttgcaactgtcctaaccttggattacatcaagatctttgttgccatctctgtgctgagtataataaatacagaaattaaaatatactggggctcctatcgccatcctgtaaacgccaccgtcttcacccgcccaagcaaaccaaggcgaaccttacctggtacttttaacatctctccctctgtgatttacaacagtttcaacccagacggagtgagtctacgagagaacctctccgagctcagctactccatcagaaaaaacaccaccctccttacctgccgggaacgtacgagtgcgtcaccggccgctgcaccacacctaccgcctgaccgtaaaccagactttttccggacagacctcaataactctgtttaccagaacaggaggtgagcttagaaaacccttagggtattaggccaaaggcgcagctactgtggggtttatgaacaattcaagcaactctacgggctattctaattcaggtttctctagaaatggacggaattattacagagcagcgcctgctagaaagacgcagggcagcggccgagcaacagcgcatgaatcaagagctccaagacatggttaacttgcaccagtgcaaaaggggtatcttttgtctggtaaagcaggccaaagtcacctacgacagtaataccaccggacaccgccttagctacaagttgccaaccaagcgtcagaaattggtggtcatggtgggagaaaagcccattaccataactcagcactcggtagaaaccgaaggctgcattcactcaccttgtcaaggacctgaggatctctgcacccttattaagaccctgtgcggtctcaaagatcttattccctttaactaataaaaaaaaataataaagcatcacttacttaaaatcagttagcaaatttctgtccagtttattcagcagcacctccttgccctcctcccagctctggtattgcagcttcctcctggctgcaaactttctccacaatctaaatggaatgtcagtttcctcctgttcctgtccatccgcacccactatcttcatgttgttgcagatgaagcgcgcaagaccgtctgaagataccttcaaccccgtgtatccatatgacacggaaaccggtcctccaactgtgccttttcttactcctccctttgtatcccccaatgggtttcaagagagtccccctggggtactctctttgcgcctatccgaacctctagttacctccaatggcatgcttgcgctcaaaatgggcaacggcctctctctggacgaggccggcaaccttacctcccaaaatgtaaccactgtgagcccacctctcaaaaaaaccaagtcaaacataaacctggaaatatctgcacccctcacagttacctcagaagccctaactgtggctgccgccgcacctctaatggtcgcgggcaacacactcaccatgcaatcacaggccccgctaaccgtgcacgactccaaacttagcattgccacccaaggacccctcacagtgtcagaaggaaagctagccctgcaaacatcaggccccctcaccaccaccgatagcagtacccttactatcactgcctcaccccctctaactactgccactggtagcttgggcattgacttgaaagagcccatttatacacaaaatggaaaactaggactaaagtacggggctcctttgcatgtaacagacgacctaaacactttgaccgtagcaactggtccaggtgtgactattaataatacttccttgcaaactaaagttactggagccttgggttttgattcacaaggcaatatgcaacttaatgtagcaggaggactaaggattgattctcaaaacagacgccttatacttgatgttagttatccgtttgatgctcaaaaccaactaaatctaagactaggacagggccctctttttataaactcagcccacaacttggatattaactacaacaaaggcctttacttgtttacagcttcaaacaattccaaaaagcttgaggttaacctaagcactgccaaggggttgatgtttgacgctacagccatagccattaatgcaggagatgggcttgaatttggttcacctaatgcaccaaacacaaatcccctcaaaacaaaaattggccatggcctagaatttgattcaaacaaggctatggttcctaaactaggaactggccttagttttgacagcacaggtgccattacagtaggaaacaaaaataatgataagctaactttgtggaccacaccagctccatctcctaactgtagactaaatgcagagaaagatgctaaactcactttggtcttaacaaaatgtggcagtcaaatacttgctacagtttcagttttggctgttaaaggcagtttggctccaatatctggaacagttcaaagtgctcatcttattataagatttgacgaaaatggagtgctactaaacaattccttcctggacccagaatattggaactttagaaatggagatcttactgaaggcacagcctatacaaacgctgttggatttatgcctaacctatcagcttatccaaaatctcacggtaaaactgccaaaagtaacattgtcagtcaagtttacttaaacggagacaaaactaaacctgtaacactaaccattacactaaacggtacacaggaaacaggagacacaactccaagtgcatactctatgtcattttcatgggactggtctggccacaactacattaatgaaatatttgccacatcctcttacactttttcatacattgcccaagaataaagaatcgtttgtgttatgtttcaacgtgtttatttttcaattgcagaaaatttcgaatcatttttcattcagtagtatagccccaccaccacatagcttatacagatcaccgtaccttaatcaaactcacagaaccctagtattcaacctgccacctccctcccaacacacagagtacacagtcctttctccccggctggccttaaaaagcatcatatcatgggtaacagacatattcttaggtgttatattccacacggtttcctgtcgagccaaacgctcatcagtgatattaataaactccccgggcagctcacttaagttcatgtcgctgtccagctgctgagccacaggctgctgtccaacttgcggttgcttaacgggcggcgaaggagaagtccacgcctacatgggggtagagtcataatcgtgcatcaggatagggcggtggtgctgcagcagcgcgcgaataaactgctgccgccgccgctccgtcctgcaggaatacaacatggcagtggtctcctcagcgatgattcgcaccgcccgcagcataaggcgccttgtcctccgggcacagcagcgcaccctgatctcacttaaatcagcacagtaactgcagcacagcaccacaatattgttcaaaatcccacagtgcaaggcgctgtatccaaagctcatggcggggaccacagaacccacgtggccatcataccacaagcgcaggtagattaagtggcgacccctcataaacacgctggacataaacattacctcttttggcatgttgtaattcaccacctcccggtaccatataaacctctgattaaacatggcgccatccaccaccatcctaaaccagctggccaaaacctgcccgccggctatacactgcagggaaccgggactggaacaatgacagtggagagcccaggactcgtaaccatggatcatcatgctcgtcatgatatcaatgttggcacaacacaggcacacgtgcatacacttcctcaggattacaagctcctcccgcgttagaaccatatcccagggaacaacccattcctgaatcagcgtaaatcccacactgcagggaagacctcgcacgtaactcacgttgtgcattgtcaaagtgttacattcgggcagcagcggatgatcctccagtatggtagcgcgggtttctgtctcaaaaggaggtagacgatccctactgtacggagtgcgccgagacaaccgagatcgtgttggtcgtagtgtcatgccaaatggaacgccggacgtagtcatatttcctgaagcaaaaccaggtgcgggcgtgacaaacagatctgcgtctccggtctcgccgcttagatcgctctgtgtagtagttgtagtatatccactctctcaaagcatccaggcgccccctggcttcgggttctatgtaaactccttcatgcgccgctgccctgataacatccaccaccgcagaataagccacacccagccaacctacacattcgttctgcgagtcacacacgggaggagcgggaagagctggaagaaccatgtttttttttttattccaaaagattatccaaaacctcaaaatgaagatctattaagtgaacgcgctcccctccggtggcgtggtcaaactctacagccaaagaacagataatggcatttgtaagatgttgcacaatggcttccaaaaggcaaacggccctcacgtccaagtggacgtaaaggctaaacccttcagggtgaatctcctctataaacattccagcaccttcaaccatgcccaaataattctcatctcgccaccttctcaatatatctctaagcaaatcccgaatattaagtccggccattgtaaaaatctgctccagagcgccctccaccttcagcctcaagcagcgaatcatgattgcaaaaattcaggttcctcacagacctgtataagattcaaaagcggaacattaacaaaaataccgcgatcccgtaggtcccttcgcagggccagctgaacataatcgtgcaggtctgcacggaccagcgcggccacttccccgccaggaaccttgacaaaagaacccacactgattatgacacgcatactcggagctatgctaaccagcgtagccccgatgtaagctttgttgcatgggcggcgatataaaatgcaaggtgctgctcaaaaaatcaggcaaagcctcgcgcaaaaaagaaagcacatcgtagtcatgctcatgcagataaaggcaggtaagctccggaaccaccacagaaaaagacaccatttttctctcaaacatgtctgcgggtttctgcataaacacaaaataaaataacaaaaaaacatttaaacattagaagcctgtcttacaacaggaaaaacaacccttataagcataagacggactacggccatgccggcgtgaccgtaaaaaaactggtcaccgtgattaaaaagcaccaccgacagctcctcggtcatgtccggagtcataatgtaagactcggtaaacacatcaggttgattcacatcggtcagtgctaaaaagcgaccgaaatagcccgggggaatacatacccgcaggcgtagagacaacattacagcccccataggaggtataacaaaattaataggagagaaaaacacataaacacctgaaaaaccctcctgcctaggcaaaatagcaccctcccgctccagaacaacatacagcgcttccacagcggcagccataacagtcagccttaccagtaaaaaagaaaacctattaaaaaaacaccactcgacacggcaccagctcaatcagtcacagtgtaaaaaagggccaagtgcagagcgagtatatataggactaaaaaatgacgtaacggttaaagtccacaaaaaacacccagaaaaccgcacgcgaacctacgcccagaaacgaaagccaaaaaacccacaacttcctcaaatcgtcacttccgttttcccacgttacgtcacttcccattttaagaaaactacaattcccaacacatacaagttactccgccctaaaacctacgtcacccgccccgttcccacgccccgcgccacgtcacaaactccaccccctcattatcatattggcttcaatccaaaataaggtatattattgatgatgttaattaatttaaatccgcatgcgatatcgagctctcccgggaattcggatctgcgacgcgaggctggatggccttccccattatgattcttctcgcttccggcggcatcgggatgcccgcgttgcaggccatgctgtccaggcaggtagatgacgaccatcagggacagcttcacggccagcaaaaggccaggaaccgtaaaaaggccgcgttgctggcgtttttccataggctccgcccccctgacgagcatcacaaaaatcgacgctcaagtcagaggtggcgaaacccgacaggactataaagataccaggcgtttccccctggaagctccctcgtgcgctctcctgttccgaccctgccgcttaccggatacctgtccgcctttctcccttcgggaagcgtggcgctttctcaatgctcacgctgtaggtatctcagttcggtgtaggtcgttcgctccaagctgggctgtgtgcacgaaccccccgttcagcccgaccgctgcgccttatccggtaactatcgtcttgagtccaacccggtaagacacgacttatcgccactggcagcagccactggtaacaggattagcagagcgaggtatgtaggcggtgctacagagttcttgaagtggtggcctaactacggctacactagaaggacagtatttggtatctgcgctctgctgaagccagttaccttcggaaaaagagttggtagctcttgatccggcaaacaaaccaccgctggtagcggtggtttttttgtttgcaagcagcagattacgcgcagaaaaaaaggatctcaagaagatcctttgatcttttctacggggtctgacgctcagtggaacgaaaactcacgttaagggattttggtcatgagattatcaaaaaggatcttcacctagatccttttaaatcaatctaaagtatatatgagtaaacttggtctgacagttaccaatgcttaatcagtgaggcacctatctcagcgatctgtctatttcgttcatccatagttgcctgactccccgtcgtgtagataactacgatacgggagggcttaccatctggccccagtgctgcaatgataccgcgagacccacgctcaccggctccagatttatcagcaataaaccagccagccggaagggccgagcgcagaagtggtcctgcaactttatccgcctccatccagtctattaattgttgccgggaagctagagtaagtagttcgccagttaatagtttgcgcaacgttgttgccattgctgcaggcatcgtggtgtcacgctcgtcgtttggtatggcttcattcagctccggttcccaacgatcaaggcgagttacatgatcccccatgttgtgcaaaaaagcggttagctccttcggtcctccgatcgttgtcagaagtaagttggccgcagtgttatcactcatggttatggcagcactgcataattctcttactgtcatgccatccgtaagatgcttttctgtgactggtgagtactcaaccaagtcattctgagaatagtgtatgcggcgaccgagttgctcttgcccggcgtcaacacgggataataccgcgccacatagcagaactttaaaagtgctcatcattggaaaacgttcttcggggcgaaaactctcaaggatcttaccgctgttgagatccagttcgatgtaacccactcgtgcacccaactgatcttcagcatcttttactttcaccagcgtttctgggtgagcaaaaacaggaaggcaaaatgccgcaaaaaagggaataagggcgacacggaaatgttgaatactcatactcttcctttttcaatattattgaagcatttatcagggttattgtctcatgagcggatacatatttgaatgtatttagaaaaataaacaaataggggttccgcgcacatttccccgaaaagtgccacctgacgtctaagaaaccattattatcatgacattaacctataaaaataggcgtatcacgaggccctttcgtcttcaaggatccgaattcccgggagagctcgatatcgcatgcggatttaaattaattaa

SEQ ID NO: 46 - DNA, 36406 bp, Artificial Sequence
  Vector with soluble s4-1BBL ectodomain construct
catcatcaataatataccttattttggattgaagccaatatgataatgagggggtggagtttgtgacgtggcgcggggcgtgggaacggggcgggtgacgtagtagtgtggcggaagtgtgatgttgcaagtgtggcggaacacatgtaagcgacggatgtggcaaaagtgacgtttttggtgtgcgccggtgtacacaggaagtgacaattttcgcgcggttttaggcggatgttgtagtaaatttgggcgtaaccgagtaagatttggccattttcgcgggaaaactgaataagaggaagtgaaatctgaataattttgtgttactcatagcgcgtaatatttgtctagggccgcggggactttgaccgtttacgtggagactcgcccaggtgtttttctcaggtgttttccgcgttccgggtcaaagttggcgttttattattatagtcagtcgaagcttggatccggtacctctagaattctcgagcggccgctagcgacatcggatctcccgatcccctatggtcgactctcagtacaatctgctctgatgccgcatagttaagccagtatctgctccctgcttgtgtgttggaggtcgctgagtagtgcgcgagcaaaatttaagctacaacaaggcaaggcttgaccgacaattgcatgaagaatctgcttagggttaggcgttttgcgctgcttcgcgatgtacgggccagatatacgcgttgacattgattattgactagttattaatagtaatcaattacggggtcattagttcatagcccatatatggagttccgcgttacataacttacggtaaatggcccgcctggctgaccgcccaacgacccccgcccattgacgtcaataatgacgtatgttcccatagtaacgccaatagggactttccattgacgtcaatgggtggactatttacggtaaactgcccacttggcagtacatcaagtgtatcatatgccaagtacgccccctattgacgtcaatgacggtaaatggcccgcctggcattatgcccagtacatgaccttatgggactttcctacttggcagtacatctacgtattagtcatcgctattaccatggtgatgcggttttggcagtacatcaatgggcgtggatagcggtttgactcacggggatttccaagtctccaccccattgacgtcaatgggagtttgttttggcaccaaaatcaacgggactttccaaaatgtcgtaacaactccgccccattgacgcaaatgggcggtaggcgtgtacggtgggaggtctatataagcagagctctctggctaactagagaacccactgcttactggcttatcgaaattaatacgactcactatagggagacccaagctggctagttaagctatcaacaagtttgtacaaaaaagcaggctgccaccatgcccatggggtctctgcaaccgctggccaccttgtacctgctggggatgctggtcgcttcctgcctcggatctggtgctggaggatcaggtggttctagtggaagtgatggtgctagcgggtctggcgttcgactttgggctacaagacaggcaatgctgggccaggtccatgaggttcctgaggggtggctcattttcgtggccgagcaggaggagctgtatgttcgcgtgcaaaacggctttaggaaggtccagctggaagcgcggacacctttgcccaggggaaccgataacgagggctcacttgatcttcgacaagggatgtttgcacagctcgtagcacaaaacgttctgctcatcgacggccccttgtcctggtactcagacccaggattggccggtgtcagtcttaccggcggactcagctacaaggaggacactaaagagttggtcgtggcaaaggcaggcgtgtattatgtgttcttccaactggaactgaggagggttgtggccggtgaaggcagcggttccgtcagtttggcgctgcacctgcagcctttgaggagtgccgcaggtgctgctgcattggctctgactgtcgacctgccacctgcctcatccgaggctagaaattctgcctttggatttcaaggcagactgttgcatctgtcagcagggcagagacttggggtgcacctccatactgaggcaagagctagacacgcttggcagctcacccaaggggccactgttcttggactcttccgggtgacaccagagatacccgcaggactcccaagtccaaggagtgaaggcggtggcggaagcggtggaggtggatctggcggaggtggaagtcttgacctgcggcagggcatgttcgctcaattggtggcccagaatgttcttctgatcgatggtcctctgtcttggtattctgatcctggcttggcaggggtgtcacttactggtggtctttcatataaagaagacacaaaggagctcgtggtggctaaagctggagtttattacgtgttttttcaattggaactccggagagtggttgccggcgaaggttccggttctgtttctcttgctctgcacttgcaaccactgagaagtgctgcaggcgcagctgctttggctttgaccgtggatttgcctcctgcttcttccgaagccagaaacagcgcttttggctttcaaggaaggctcctgcatctctctgccggccaacgactgggagtgcatttgcacactgaagcacgcgcaagacatgcatggcagcttactcaaggagctacggtgctcggattgtttcgggtcacccctgagatacctgctgggctgcctagtcctagatcagaaggaggtggtggctctggtggaggaggttctggagggggaggaagcctggatctgcgacaaggcatgtttgcccagctcgttgcacaaaatgtgctgctgatcgacggacctctctcctggtattccgatcccgggttggctggagttagtctcacgggaggactgtcctacaaagaagatacgaaggaactcgtggtcgcaaaagctggggtttactacgtttttttccaacttgagctgcggagagttgtcgccggagaagggagcggatctgtatcattggcacttcaccttcagccgctcagatctgctgcaggtgccgctgcacttgctttgactgtggatctgcctccagcctcttctgaagcccgcaactctgcgtttggattccaagggagactgctccacctcagtgctggccaaagacttggagtccatctgcacacagaagcgagagccagacatgcctggcagctcactcagggggctactgtcctcggactgtttagagtcactccagaaataccagccggcctgccttcacctcgaagcgaataaacccagctttcttgtacaaagtggttgatctagagggcccgcggttcgaaggtaagcctatccctaaccctctcctcggtctcgattctacgcgtaccggttagtaatgagtttaaacgggggaggctaactgaaacacggaaggagacaataccggaaggaacccgcgctatgacggcaataaaaagacagaataaaacgcacgggtgttgggtcgtttgttcataaacgcggggttcggtcccagggctggcactctgtcgataccccaccgagaccccattggggccaatacgcccgcgtttcttccttttccccaccccaccccccaagttcgggtgaaggcccagggctcgcagccaacgtcggggcggcaggccctgccatagcagatccgattcgacagatcactgaaatgtgtgggcgtggcttaagggtgggaaagaatatataaggtgggggtcttatgtagttttgtatctgttttgcagcagccgccgccgccatgagcaccaactcgtttgatggaagcattgtgagctcatatttgacaacgcgcatgcccccatgggccggggtgcgtcagaatgtgatgggctccagcattgatggtcgccccgtcctgcccgcaaactctactaccttgacctacgagaccgtgtctggaacgccgttggagactgcagcctccgccgccgcttcagccgctgcagccaccgcccgcgggattgtgactgactttgctttcctgagcccgcttgcaagcagtgcagcttcccgttcatccgcccgcgatgacaagttgacggctcttttggcacaattggattctttgacccgggaacttaatgtcgtttctcagcagctgttggatctgcgccagcaggtttctgccctgaaggcttcctcccctcccaatgcggtttaaaacataaataaaaaaccagactctgtttggatttggatcaagcaagtgtcttgctgtctttatttaggggttttgcgcgcgcggtaggcccgggaccagcggtctcggtcgttgagggtcctgtgtattttttccaggacgtggtaaaggtgactctggatgttcagatacatgggcataagcccgtctctggggtggaggtagcaccactgcagagcttcatgctgcggggtggtgttgtagatgatccagtcgtagcaggagcgctgggcgtggtgcctaaaaatgtctttcagtagcaagctgattgccaggggcaggcccttggtgtaagtgtttacaaagcggttaagctgggatgggtgcatacgtggggatatgagatgcatcttggactgtatttttaggttggctatgttcccagccatatccctccggggattcatgttgtgcagaaccaccagcacagtgtatccggtgcacttgggaaatttgtcatgtagcttagaaggaaatgcgtggaagaacttggagacgcccttgtgacctccaagattttccatgcattcgtccataatgatggcaatgggcccacgggcggcggcctgggcgaagatatttctgggatcactaacgtcatagttgtgttccaggatgagatcgtcataggccatttttacaaagcgcgggcggagggtgccagactgcggtataatggttccatccggcccaggggcgtagttaccctcacagatttgcatttcccacgctttgagttcagatggggggatcatgtctacctgcggggcgatgaagaaaacggtttccggggtaggggagatcagctgggaagaaagcaggttcctgagcagctgcgacttaccgcagccggtgggcccgtaaatcacacctattaccgggtgcaactggtagttaagagagctgcagctgccgtcatccctgagcaggggggccacttcgttaagcatgtccctgactcgcatgttttccctgaccaaatccgccagaaggcgctcgccgcccagcgatagcagttcttgcaaggaagcaaagtttttcaacggtttgagaccgtccgccgtaggcatgcttttgagcgtttgaccaagcagttccaggcggtcccacagctcggtcacctgctctacggcatctcgatccagcatatctcctcgtttcgcgggttggggcggctttcgctgtacggcagtagtcggtgctcgtccagacgggccagggtcatgtctttccacgggcgcagggtcctcgtcagcgtagtctgggtcacggtgaaggggtgcgctccgggctgcgcgctggccagggtgcgcttgaggctggtcctgctggtgctgaagcgctgccggtcttcgccctgcgcgtcggccaggtagcatttgaccatggtgtcatagtccagcccctccgcggcgtggcccttggcgcgcagcttgcccttggaggaggcgccgcacgaggggcagtgcagacttttgagggcgtagagcttgggcgcgagaaataccgattccggggagtaggcatccgcgccgcaggccccgcagacggtctcgcattccacgagccaggtgagctctggccgttcggggtcaaaaaccaggtttcccccatgctttttgatgcgtttcttacctctggtttccatgagccggtgtccacgctcggtgacgaaaaggctgtccgtgtccccgtatacagacttgagaggcctgtcctcgagcggtgttccgcggtcctcctcgtatagaaactcggaccactctgagacaaaggctcgcgtccaggccagcacgaaggaggctaagtgggaggggtagcggtcgttgtccactagggggtccactcgctccagggtgtgaagacacatgtcgccctcttcggcatcaaggaaggtgattggtttgtaggtgtaggccacgtgaccgggtgttcctgaaggggggctataaaagggggtgggggcgcgttcgtcctcactctcttccgcatcgctgtctgcgagggccagctgttggggtgagtactccctctgaaaagcgggcatgacttctgcgctaagattgtcagtttccaaaaacgaggaggatttgatattcacctggcccgcggtgatgcctttgagggtggccgcatccatctggtcagaaaagacaatctttttgttgtcaagcttggtggcaaacgacccgtagagggcgttggacagcaacttggcgatggagcgcagggtttggtttttgtcgcgatcggcgcgctccttggccgcgatgtttagctgcacgtattcgcgcgcaacgcaccgccattcgggaaagacggtggtgcgctcgtcgggcaccaggtgcacgcgccaaccgcggttgtgcagggtgacaaggtcaacgctggtggctacctctccgcgtaggcgctcgttggtccagcagaggcggccgcccttgcgcgagcagaatggcggtagggggtctagctgcgtctcgtccggggggtctgcgtccacggtaaagaccccgggcagcaggcgcgcgtcgaagtagtctatcttgcatccttgcaagtctagcgcctgctgccatgcgcgggcggcaagcgcgcgctcgtatgggttgagtgggggaccccatggcatggggtgggtgagcgcggaggcgtacatgccgcaaatgtcgtaaacgtagaggggctctctgagtattccaagatatgtagggtagcatcttccaccgcggatgctggcgcgcacgtaatcgtatagttcgtgcgagggagcgaggaggtcgggaccgaggttgctacgggcgggctgctctgctcggaagactatctgcctgaagatggcatgtgagttggatgatatggttggacgctggaagacgttgaagctggcgtctgtgagacctaccgcgtcacgcacgaaggaggcgtaggagtcgcgcagcttgttgaccagctcggcggtgacctgcacgtctagggcgcagtagtccagggtttccttgatgatgtcatacttatcctgtcccttttttttccacagctcgcggttgaggacaaactcttcgcggtctttccagtactcttggatcggaaacccgtcggcctccgaacggtaagagcctagcatgtagaactggttgacggcctggtaggcgcagcatcccttttctacgggtagcgcgtatgcctgcgcggccttccggagcgaggtgtgggtgagcgcaaaggtgtccctgaccatgactttgaggtactggtatttgaagtcagtgtcgtcgcatccgccctgctcccagagcaaaaagtccgtgcgctttttggaacgcggatttggcagggcgaaggtgacatcgttgaagagtatctttcccgcgcgaggcataaagttgcgtgtgatgcggaagggtcccggcacctcggaacggttgttaattacctgggcggcgagcacgatctcgtcaaagccgttgatgttgtggcccacaatgtaaagttccaagaagcgcgggatgcccttgatggaaggcaattttttaagttcctcgtaggtgagctcttcaggggagctgagcccgtgctctgaaagggcccagtctgcaagatgagggttggaagcgacgaatgagctccacaggtcacgggccattagcatttgcaggtggtcgcgaaaggtcctaaactggcgacctatggccattttttctggggtgatgcagtagaaggtaagcgggtcttgttcccagcggtcccatccaaggttcgcggctaggtctcgcgcggcagtcactagaggctcatctccgccgaacttcatgaccagcatgaagggcacgagctgcttcccaaaggcccccatccaagtataggtctctacatcgtaggtgacaaagagacgctcggtgcgaggatgcgagccgatcgggaagaactggatctcccgccaccaattggaggagtggctattgatgtggtgaaagtagaagtccctgcgacgggccgaacactcgtgctggcttttgtaaaaacgtgcgcagtactggcagcggtgcacgggctgtacatcctgcacgaggttgacctgacgaccgcgcacaaggaagcagagtgggaatttgagcccctcgcctggcgggtttggctggtggtcttctacttcggctgcttgtccttgaccgtctggctgctcgaggggagttacggtggatcggaccaccacgccgcgcgagcccaaagtccagatgtccgcgcgcggcggtcggagcttgatgacaacatcgcgcagatgggagctgtccatggtctggagctcccgcggcgtcaggtcaggcgggagctcctgcaggtttacctcgcatagacgggtcagggcgcgggctagatccaggtgatacctaatttccaggggctggttggtggcggcgtcgatggcttgcaagaggccgcatccccgcggcgcgactacggtaccgcgcggcgggcggtgggccgcgggggtgtccttggatgatgcatctaaaagcggtgacgcgggcgagcccccggaggtagggggggctccggacccgccgggagagggggcaggggcacgtcggcgccgcgcgcgggcaggagctggtgctgcgcgcgtaggttgctggcgaacgcgacgacgcggcggttgatctcctgaatctggcgcctctgcgtgaagacgacgggcccggtgagcttgagcctgaaagagagttcgacagaatcaatttcggtgtcgttgacggcggcctggcgcaaaatctcctgcacgtctcctgagttgtcttgataggcgatctcggccatgaactgctcgatctcttcctcctggagatctccgcgtccggctcgctccacggtggcggcgaggtcgttggaaatgcgggccatgagctgcgagaaggcgttgaggcctccctcgttccagacgcggctgtagaccacgcccccttcggcatcgcgggcgcgcatgaccacctgcgcgagattgagctccacgtgccgggcgaagacggcgtagtttcgcaggcgctgaaagaggtagttgagggtggtggcggtgtgttctgccacgaagaagtacataacccagcgtcgcaacgtggattcgttgatatcccccaaggcctcaaggcgctccatggcctcgtagaagtccacggcgaagttgaaaaactgggagttgcgcgccgacacggttaactcctcctccagaagacggatgagctcggcgacagtgtcgcgcacctcgcgctcaaaggctacaggggcctcttcttcttcttcaatctcctcttccataagggcctccccttcttcttcttctggcggcggtgggggaggggggacacggcggcgacgacggcgcaccgggaggcggtcgacaaagcgctcgatcatctccccgcggcgacggcgcatggtctcggtgacggcgcggccgttctcgcgggggcgcagttggaagacgccgcccgtcatgtcccggttatgggttggcggggggctgccatgcggcagggatacggcgctaacgatgcatctcaacaattgttgtgtaggtactccgccgccgagggacctgagcgagtccgcatcgaccggatcggaaaacctctcgagaaaggcgtctaaccagtcacagtcgcaaggtaggctgagcaccgtggcgggcggcagcgggcggcggtcggggttgtttctggcggaggtgctgctgatgatgtaattaaagtaggcggtcttgagacggcggatggtcgacagaagcaccatgtccttgggtccggcctgctgaatgcgcaggcggtcggccatgccccaggcttcgttttgacatcggcgcaggtctttgtagtagtcttgcatgagcctttctaccggcacttcttcttctccttcctcttgtcctgcatctcttgcatctatcgctgcggcggcggcggagtttggccgtaggtggcgccctcttcctcccatgcgtgtgaccccgaagcccctcatcggctgaagcagggctaggtcggcgacaacgcgctcggctaatatggcctgctgcacctgcgtgagggtagactggaagtcatccatgtccacaaagcggtggtatgcgcccgtgttgatggtgtaagtgcagttggccataacggaccagttaacggtctggtgacccggctgcgagagctcggtgtacctgagacgcgagtaagccctcgagtcaaatacgtagtcgttgcaagtccgcaccaggtactggtatcccaccaaaaagtgcggcggcggctggcggtagaggggccagcgtagggtggccggggctccgggggcgagatcttccaacataaggcgatgatatccgtagatgtacctggacatccaggtgatgccggcggcggtggtggaggcgcgcggaaagtcgcggacgcggttccagatgttgcgcagcggcaaaaagtgctccatggtcgggacgctctggccggtcaggcgcgcgcaatcgttgacgctctagaccgtgcaaaaggagagcctgtaagcgggcactcttccgtggtctggtggataaattcgcaagggtatcatggcggacgaccggggttcgagccccgtatccggccgtccgccgtgatccatgcggttaccgcccgcgtgtcgaacccaggtgtgcgacgtcagacaacgggggagtgctccttttggcttccttccaggcgcggcggctgctgcgctagcttttttggccactggccgcgcgcagcgtaagcggttaggctggaaagcgaaagcattaagtggctcgctccctgtagccggagggttattttccaagggttgagtcgcgggacccccggttcgagtctcggaccggccggactgcggcgaacgggggtttgcctccccgtcatgcaagaccccgcttgcaaattcctccggaaacagggacgagccccttttttgcttttcccagatgcatccggtgctgcggcagatgcgcccccctcctcagcagcggcaagagcaagagcagcggcagacatgcagggcaccctcccctcctcctaccgcgtcaggaggggcgacatccgcggttgacgcggcagcagatggtgattacgaacccccgcggcgccgggcccggcactacctggacttggaggagggcgagggcctggcgcggctaggagcgccctctcctgagcggtacccaagggtgcagctgaagcgtgatacgcgtgaggcgtacgtgccgcggcagaacctgtttcgcgaccgcgagggagaggagcccgaggagatgcgggatcgaaagttccacgcagggcgcgagctgcggcatggcctgaatcgcgagcggttgctgcgcgaggaggactttgagcccgacgcgcgaaccgggattagtcccgcgcgcgcacacgtggcggccgccgacctggtaaccgcatacgagcagacggtgaaccaggagattaactttcaaaaaagctttaacaaccacgtgcgtacgcttgtggcgcgcgaggaggtggctataggactgatgcatctgtgggactttgtaagcgcgctggagcaaaacccaaatagcaagccgctcatggcgcagctgttccttatagtgcagcacagcagggacaacgaggcattcagggatgcgctgctaaacatagtagagcccgagggccgctggctgctcgatttgataaacatcctgcagagcatagtggtgcaggagcgcagcttgagcctggctgacaaggtggccgccatcaactattccatgcttagcctgggcaagttttacgcccgcaagatataccataccccttacgttcccatagacaaggaggtaaagatcgaggggttctacatgcgcatggcgctgaaggtgcttaccttgagcgacgacctgggcgtttatcgcaacgagcgcatccacaaggccgtgagcgtgagccggcggcgcgagctcagcgaccgcgagctgatgcacagcctgcaaagggccctggctggcacgggcagcggcgatagagaggccgagtcctactttgacgcgggcgctgacctgcgctgggccccaagccgacgcgccctggaggcagctggggccggacctgggctggcggtggcacccgcgcgcgctggcaacgtcggcggcgtggaggaatatgacgaggacgatgagtacgagccagaggacggcgagtactaagcggtgatgtttctgatcagatgatgcaagacgcaacggacccggcggtgcgggcggcgctgcagagccagccgtccggccttaactccacggacgactggcgccaggtcatggaccgcatcatgtcgctgactgcgcgcaatcctgacgcgttccggcagcagccgcaggccaaccggctctccgcaattctggaagcggtggtcccggcgcgcgcaaaccccacgcacgagaaggtgctggcgatcgtaaacgcgctggccgaaaacagggccatccggcccgacgaggccggcctggtctacgacgcgctgcttcagcgcgtggctcgttacaacagcggcaacgtgcagaccaacctggaccggctggtgggggatgtgcgcgaggccgtggcgcagcgtgagcgcgcgcagcagcagggcaacctgggctccatggttgcactaaacgccttcctgagtacacagcccgccaacgtgccgcggggacaggaggactacaccaactttgtgagcgcactgcggctaatggtgactgagacaccgcaaagtgaggtgtaccagtctgggccagactattttttccagaccagtagacaaggcctgcagaccgtaaacctgagccaggctttcaaaaacttgcaggggctgtggggggtgcgggctcccacaggcgaccgcgcgaccgtgtctagcttgctgacgcccaactcgcgcctgttgctgctgctaatagcgcccttcacggacagtggcagcgtgtcccgggacacatacctaggtcacttgctgacactgtaccgcgaggccataggtcaggcgcatgtggacgagcatactttccaggagattacaagtgtcagccgcgcgctggggcaggaggacacgggcagcctggaggcaaccctaaactacctgctgaccaaccggcggcagaagatcccctcgttgcacagtttaaacagcgaggaggagcgcattttgcgctacgtgcagcagagcgtgagccttaacctgatgcgcgacggggtaacgcccagcgtggcgctggacatgaccgcgcgcaacatggaaccgggcatgtatgcctcaaaccggccgtttatcaaccgcctaatggactacttgcatcgcgcggccgccgtgaaccccgagtatttcaccaatgccatcttgaacccgcactggctaccgccccctggtttctacaccgggggattcgaggtgcccgagggtaacgatggattcctctgggacgacatagacgacagcgtgttttccccgcaaccgcagaccctgctagagttgcaacagcgcgagcaggcagaggcggcgctgcgaaaggaaagcttccgcaggccaagcagcttgtccgatctaggcgctgcggccccgcggtcagatgctagtagcccatttccaagcttgatagggtctcttaccagcactcgcaccacccgcccgcgcctgctgggcgaggaggagtacctaaacaactcgctgctgcagccgcagcgcgaaaaaaacctgcctccggcatttcccaacaacgggatagagagcctagtggacaagatgagtagatggaagacgtacgcgcaggagcacagggacgtgccaggcccgcgcccgcccacccgtcgtcaaaggcacgaccgtcagcggggtctggtgtgggaggacgatgactcggcagacgacagcagcgtcctggatttgggagggagtggcaacccgtttgcgcaccttcgccccaggctggggagaatgttttaaaaaaaaaaaagcatgatgcaaaataaaaaactcaccaaggccatggcaccgagcgttggttttcttgtattccccttagtatgcggcgcgcggcgatgtatgaggaaggtcctcctccctcctacgagagtgtggtgagcgcggcgccagtggcggcggcgctgggttctcccttcgatgctcccctggacccgccgtttgtgcctccgcggtacctgcggcctaccggggggagaaacagcatccgttactctgagttggcacccctattcgacaccacccgtgtgtacctggtggacaacaagtcaacggatgtggcatccctgaactaccagaacgaccacagcaactttctgaccacggtcattcaaaacaatgactacagcccgggggaggcaagcacacagaccatcaatcttgacgaccggtcgcactggggcggcgacctgaaaaccatcctgcataccaacatgccaaatgtgaacgagttcatgtttaccaataagtttaaggcgcgggtgatggtgtcgcgcttgcctactaaggacaatcaggtggagctgaaatacgagtgggtggagttcacgctgcccgagggcaactactccgagaccatgaccatagaccttatgaacaacgcgatcgtggagcactacttgaaagtgggcagacagaacggggttctggaaagcgacatcggggtaaagtttgacacccgcaacttcagactggggtttgaccccgtcactggtcttgtcatgcctggggtatatacaaacgaagccttccatccagacatcattttgctgccaggatgcggggtggacttcacccacagccgcctgagcaacttgttgggcatccgcaagcggcaacccttccaggagggctttaggatcacctacgatgatctggagggtggtaacattcccgcactgttggatgtggacgcctaccaggcgagcttgaaagatgacaccgaacagggcgggggtggcgcaggcggcagcaacagcagtggcagcggcgcggaagagaactccaacgcggcagccgcggcaatgcagccggtggaggacatgaacgatcatgccattcgcggcgacacctttgccacacgggctgaggagaagcgcgctgaggccgaagcagcggccgaagctgccgcccccgctgcgcaacccgaggtcgagaagcctcagaagaaaccggtgatcaaacccctgacagaggacagcaagaaacgcagttacaacctaataagcaatgacagcaccttcacccagtaccgcagctggtaccttgcatacaactacggcgaccctcagaccggaatccgctcatggaccctgctttgcactcctgacgtaacctgcggctcggagcaggtctactggtcgttgccagacatgatgcaagaccccgtgaccttccgctccacgcgccagatcagcaactttccggtggtgggcgccgagctgttgcccgtgcactccaagagcttctacaacgaccaggccgtctactcccaactcatccgccagtttacctctctgacccacgtgttcaatcgctttcccgagaaccagattttggcgcgcccgccagcccccaccatcaccaccgtcagtgaaaacgttcctgctctcacagatcacgggacgctaccgctgcgcaacagcatcggaggagtccagcgagtgaccattactgacgccagacgccgcacctgcccctacgtttacaaggccctgggcatagtctcgccgcgcgtcctatcgagccgcactttttgagcaagcatgtccatccttatatcgcccagcaataacacaggctggggcctgcgcttcccaagcaagatgtttggcggggccaagaagcgctccgaccaacacccagtgcgcgtgcgcgggcactaccgcgcgccctggggcgcgcacaaacgcggccgcactgggcgcaccaccgtcgatgacgccatcgacgcggtggtggaggaggcgcgcaactacacgcccacgccgccaccagtgtccacagtggacgcggccattcagaccgtggtgcgcggagcccggcgctatgctaaaatgaagagacggcggaggcgcgtagcacgtcgccaccgccgccgacccggcactgccgcccaacgcgcggcggcggccctgcttaaccgcgcacgtcgcaccggccgacgggcggccatgcgggccgctcgaaggctggccgcgggtattgtcactgtgccccccaggtccaggcgacgagcggccgccgcagcagccgcggccattagtgctatgactcagggtcgcaggggcaacgtgtattgggtgcgcgactcggttagcggcctgcgcgtgcccgtgcgcacccgccccccgcgcaactagattgcaagaaaaaactacttagactcgtactgttgtatgtatccagcggcggcggcgcgcaacgaagctatgtccaagcgcaaaatcaaagaagagatgctccaggtcatcgcgccggagatctatggccccccgaagaaggaagagcaggattacaagccccgaaagctaaagcgggtcaaaaagaaaaagaaagatgatgatgatgaacttgacgacgaggtggaactgctgcacgctaccgcgcccaggcgacgggtacagtggaaaggtcgacgcgtaaaacgtgttttgcgacccggcaccaccgtagtctttacgcccggtgagcgctccacccgcacctacaagcgcgtgtatgatgaggtgtacggcgacgaggacctgcttgagcaggccaacgagcgcctcggggagtttgcctacggaaagcggcataaggacatgctggcgttgccgctggacgagggcaacccaacacctagcctaaagcccgtaacactgcagcaggtgctgcccgcgcttgcaccgtccgaagaaaagcgcggcctaaagcgcgagtctggtgacttggcacccaccgtgcagctgatggtacccaagcgccagcgactggaagatgtcttggaaaaaatgaccgtggaacctgggctggagcccgaggtccgcgtgcggccaatcaagcaggtggcgccgggactgggcgtgcagaccgtggacgttcagatacccactaccagtagcaccagtattgccaccgccacagagggcatggagacacaaacgtccccggttgcctcagcggtggcggatgccgcggtgcaggcggtcgctgcggccgcgtccaagacctctacggaggtgcaaacggacccgtggatgtttcgcgtttcagccccccggcgcccgcgcggttcgaggaagtacggcgccgccagcgcgctactgcccgaatatgccctacatccttccattgcgcctacccccggctatcgtggctacacctaccgccccagaagacgagcaactacccgacgccgaaccaccactggaacccgccgccgccgtcgccgtcgccagcccgtgctggccccgatttccgtgcgcagggtggctcgcgaaggaggcaggaccctggtgctgccaacagcgcgctaccaccccagcatcgtttaaaagccggtctttgtggttcttgcagatatggccctcacctgccgcctccgtttcccggtgccgggattccgaggaagaatgcaccgtaggaggggcatggccggccacggcctgacgggcggcatgcgtcgtgcgcaccaccggcggcggcgcgcgtcgcaccgtcgcatgcgcggcggtatcctgcccctccttattccactgatcgccgcggcgattggcgccgtgcccggaattgcatccgtggccttgcaggcgcagagacactgattaaaaacaagttgcatgtggaaaaatcaaaataaaaagtctggactctcacgctcgcttggtcctgtaactattttgtagaatggaagacatcaactttgcgtctctggccccgcgacacggctcgcgcccgttcatgggaaactggcaagatatcggcaccagcaatatgagcggtggcgccttcagctggggctcgctgtggagcggcattaaaaatttcggttccaccgttaagaactatggcagcaaggcctggaacagcagcacaggccagatgctgagggataagttgaaagagcaaaatttccaacaaaaggtggtagatggcctggcctctggcattagcggggtggtggacctggccaaccaggcagtgcaaaataagattaacagtaagcttgatccccgccctcccgtagaggagcctccaccggccgtggagacagtgtctccagaggggcgtggcgaaaagcgtccgcgccccgacagggaagaaactctggtgacgcaaatagacgagcctccctcgtacgaggaggcactaaagcaaggcctgcccaccacccgtcccatcgcgcccatggctaccggagtgctgggccagcacacacccgtaacgctggacctgcctccccccgccgacacccagcagaaacctgtgctgccaggcccgaccgccgttgttgtaacccgtcctagccgcgcgtccctgcgccgcgccgccagcggtccgcgatcgttgcggcccgtagccagtggcaactggcaaagcacactgaacagcatcgtgggtctgggggtgcaatccctgaagcgccgacgatgcttctgaatagctaacgtgtcgtatgtgtgtcatgtatgcgtccatgtcgccgccagaggagctgctgagccgccgcgcgcccgctttccaagatggctaccccttcgatgatgccgcagtggtcttacatgcacatctcgggccaggacgcctcggagtacctgagccccgggctggtgcagtttgcccgcgccaccgagacgtacttcagcctgaataacaagtttagaaaccccacggtggcgcctacgcacgacgtgaccacagaccggtcccagcgtttgacgctgcggttcatccctgtggaccgtgaggatactgcgtactcgtacaaggcgcggttcaccctagctgtgggtgataaccgtgtgctggacatggcttccacgtactttgacatccgcggcgtgctggacaggggccctacttttaagccctactctggcactgcctacaacgccctggctcccaagggtgccccaaatccttgcgaatgggatgaagctgctactgctcttgaaataaacctagaagaagaggacgatgacaacgaagacgaagtagacgagcaagctgagcagcaaaaaactcacgtatttgggcaggcgccttattctggtataaatattacaaaggagggtattcaaataggtgtcgaaggtcaaacacctaaatatgccgataaaacatttcaacctgaacctcaaataggagaatctcagtggtacgaaactgaaattaatcatgcagctgggagagtccttaaaaagactaccccaatgaaaccatgttacggttcatatgcaaaacccacaaatgaaaatggagggcaaggcattcttgtaaagcaacaaaatggaaagctagaaagtcaagtggaaatgcaatttttctcaactactgaggcgaccgcaggcaatggtgataacttgactcctaaagtggtattgtacagtgaagatgtagatatagaaaccccagacactcatatttcttacatgcccactattaaggaaggtaactcacgagaactaatgggccaacaatctatgcccaacaggcctaattacattgcttttagggacaattttattggtctaatgtattacaacagcacgggtaatatgggtgttctggcgggccaagcatcgcagttgaatgctgttgtagatttgcaagacagaaacacagagctttcataccagcttttgcttgattccattggtgatagaaccaggtacttttctatgtggaatcaggctgttgacagctatgatccagatgttagaattattgaaaatcatggaactgaagatgaacttccaaattactgctttccactgggaggtgtgattaatacagagactcttaccaaggtaaaacctaaaacaggtcaggaaaatggatgggaaaaagatgctacagaattttcagataaaaatgaaataagagttggaaataattttgccatggaaatcaatctaaatgccaacctgtggagaaatttcctgtactccaacatagcgctgtatttgcccgacaagctaaagtacagtccttccaacgtaaaaatttctgataacccaaacacctacgactacatgaacaagcgagtggtggctcccgggttagtggactgctacattaaccttggagcacgctggtcccttgactatatggacaacgtcaacccatttaaccaccaccgcaatgctggcctgcgctaccgctcaatgttgctgggcaatggtcgctatgtgcccttccacatccaggtgcctcagaagttctttgccattaaaaacctccttctcctgccgggctcatacacctacgagtggaacttcaggaaggatgttaacatggttctgcagagctccctaggaaatgacctaagggttgacggagccagcattaagtttgatagcatttgcctttacgccaccttcttccccatggcccacaacaccgcctccacgcttgaggccatgcttagaaacgacaccaacgaccagtcctttaacgactatctctccgccgccaacatgctctaccctatacccgccaacgctaccaacgtgcccatatccatcccctcccgcaactgggcggctttccgcggctgggccttcacgcgccttaagactaaggaaaccccatcactgggctcgggctacgacccttattacacctactctggctctataccctacctagatggaaccttttacctcaaccacacctttaagaaggtggccattacctttgactcttctgtcagctggcctggcaatgaccgcctgcttacccccaacgagtttgaaattaagcgctcagttgacggggagggttacaacgttgcccagtgtaacatgaccaaagactggttcctggtacaaatgctagctaactacaacattggctaccagggcttctatatcccagagagctacaaggaccgcatgtactccttctttagaaacttccagcccatgagccgtcaggtggtggatgatactaaatacaaggactaccaacaggtgggcatcctacaccaacacaacaactctggatttgttggctaccttgcccccaccatgcgcgaaggacaggcctaccctgctaacttcccctatccgcttataggcaagaccgcagttgacagcattacccagaaaaagtttctttgcgatcgcaccctttggcgcatcccattctccagtaactttatgtccatgggcgcactcacagacctgggccaaaaccttctctacgccaactccgcccacgcgctagacatgacttttgaggtggatcccatggacgagcccacccttctttatgttttgtttgaagtctttgacgtggtccgtgtgcaccggccgcaccgcggcgtcatcgaaaccgtgtacctgcgcacgcccttctcggccggcaacgccacaacataaagaagcaagcaacatcaacaacagctgccgccatgggctccagtgagcaggaactgaaagccattgtcaaagatcttggttgtgggccatattttttgggcacctatgacaagcgctttccaggctttgtttctccacacaagctcgcctgcgccatagtcaatacggccggtcgcgagactgggggcgtacactggatggcctttgcctggaacccgcactcaaaaacatgctacctctttgagccctttggcttttctgaccagcgactcaagcaggtttaccagtttgagtacgagtcactcctgcgccgtagcgccattgcttcttcccccgaccgctgtataacgctggaaaagtccacccaaagcgtacaggggcccaactcggccgcctgtggactattctgctgcatgtttctccacgcctttgccaactggccccaaactcccatggatcacaaccccaccatgaaccttattaccggggtacccaactccatgctcaacagtccccaggtacagcccaccctgcgtcgcaaccaggaacagctctacagcttcctggagcgccactcgccctacttccgcagccacagtgcgcagattaggagcgccacttctttttgtcacttgaaaaacatgtaaaaataatgtactagagacactttcaataaaggcaaatgcttttatttgtacactctcgggtgattatttacccccacccttgccgtctgcgccgtttaaaaatcaaaggggttctgccgcgcatcgctatgcgccactggcagggacacgttgcgatactggtgtttagtgctccacttaaactcaggcacaaccatccgcggcagctcggtgaagttttcactccacaggctgcgcaccatcaccaacgcgtttagcaggtcgggcgccgatatcttgaagtcgcagttggggcctccgccctgcgcgcgcgagttgcgatacacagggttgcagcactggaacactatcagcgccgggtggtgcacgctggccagcacgctcttgtcggagatcagatccgcgtccaggtcctccgcgttgctcagggcgaacggagtcaactttggtagctgccttcccaaaaagggcgcgtgcccaggctttgagttgcactcgcaccgtagtggcatcaaaaggtgaccgtgcccggtctgggcgttaggatacagcgcctgcataaaagccttgatctgcttaaaagccacctgagcctttgcgccttcagagaagaacatgccgcaagacttgccggaaaactgattggccggacaggccgcgtcgtgcacgcagcaccttgcgtcggtgttggagatctgcaccacatttcggccccaccggttcttcacgatcttggccttgctagactgctccttcagcgcgcgctgcccgttttcgctcgtcacatccatttcaatcacgtgctccttatttatcataatgcttccgtgtagacacttaagctcgccttcgatctcagcgcagcggtgcagccacaacgcgcagcccgtgggctcgtgatgcttgtaggtcacctctgcaaacgactgcaggtacgcctgcaggaatcgccccatcatcgtcacaaaggtcttgttgctggtgaaggtcagctgcaacccgcggtgctcctcgttcagccaggtcttgcatacggccgccagagcttccacttggtcaggcagtagtttgaagttcgcctttagatcgttatccacgtggtacttgtccatcagcgcgcgcgcagcctccatgcccttctcccacgcagacacgatcggcacactcagcgggttcatcaccgtaatttcactttccgcttcgctgggctcttcctcttcctcttgcgtccgcataccacgcgccactgggtcgtcttcattcagccgccgcactgtgcgcttacctcctttgccatgcttgattagcaccggtgggttgctgaaacccaccatttgtagcgccacatcttctctttcttcctcgctgtccacgattacctctggtgatggcgggcgctcgggcttgggagaagggcgcttctttttcttcttgggcgcaatggccaaatccgccgccgaggtcgatggccgcgggctgggtgtgcgcggcaccagcgcgtcttgtgatgagtcttcctcgtcctcggactcgatacgccgcctcatccgcttttttgggggcgcccggggaggcggcggcgacggggacggggacgacacgtcctccatggttgggggacgtcgcgccgcaccgcgtccgcgctcgggggtggtttcgcgctgctcctcttcccgactggccatttccttctcctataggcagaaaaagatcatggagtcagtcgagaagaaggacagcctaaccgccccctctgagttcgccaccaccgcctccaccgatgccgccaacgcgcctaccaccttccccgtcgaggcacccccgcttgaggaggaggaagtgattatcgagcaggacccaggttttgtaagcgaagacgacgaggaccgctcagtaccaacagaggataaaaagcaagaccaggacaacgcagaggcaaacgaggaacaagtcgggcggggggacgaaaggcatggcgactacctagatgtgggagacgacgtgctgttgaagcatctgcagcgccagtgcgccattatctgcgacgcgttgcaagagcgcagcgatgtgcccctcgccatagcggatgtcagccttgcctacgaacgccacctattctcaccgcgcgtaccccccaaacgccaagaaaacggcacatgcgagcccaacccgcgcctcaacttctaccccgtatttgccgtgccagaggtgcttgccacctatcacatctttttccaaaactgcaagatacccctatcctgccgtgccaaccgcagccgagcggacaagcagctggccttgcggcagggcgctgtcatacctgatatcgcctcgctcaacgaagtgccaaaaatctttgagggtcttggacgcgacgagaagcgcgcggcaaacgctctgcaacaggaaaacagcgaaaatgaaagtcactctggagtgttggtggaactcgagggtgacaacgcgcgcctagccgtactaaaacgcagcatcgaggtcacccactttgcctacccggcacttaacctaccccccaaggtcatgagcacagtcatgagtgagctgatcgtgcgccgtgcgcagcccctggagagggatgcaaatttgcaagaacaaacagaggagggcctacccgcagttggcgacgagcagctagcgcgctggcttcaaacgcgcgagcctgccgacttggaggagcgacgcaaactaatgatggccgcagtgctcgttaccgtggagcttgagtgcatgcagcggttctttgctgacccggagatgcagcgcaagctagaggaaacattgcactacacctttcgacagggctacgtacgccaggcctgcaagatctccaacgtggagctctgcaacctggtctcctaccttggaattttgcacgaaaaccgccttgggcaaaacgtgcttcattccacgctcaagggcgaggcgcgccgcgactacgtccgcgactgcgtttacttatttctatgctacacctggcagacggccatgggcgtttggcagcagtgcttggaggagtgcaacctcaaggagctgcagaaactgctaaagcaaaacttgaaggacctatggacggccttcaacgagcgctccgtggccgcgcacctggcggacatcattttccccgaacgcctgcttaaaaccctgcaacagggtctgccagacttcaccagtcaaagcatgttgcagaactttaggaactttatcctagagcgctcaggaatcttgcccgccacctgctgtgcacttcctagcgactttgtgcccattaagtaccgcgaatgccctccgccgctttggggccactgctaccttctgcagctagccaactaccttgcctaccactctgacataatggaagacgtgagcggtgacggtctactggagtgtcactgtcgctgcaacctatgcaccccgcaccgctccctggtttgcaattcgcagctgcttaacgaaagtcaaattatcggtacctttgagctgcagggtccctcgcctgacgaaaagtccgcggctccggggttgaaactcactccggggctgtggacgtcggcttaccttcgcaaatttgtacctgaggactaccacgcccacgagattaggttctacgaagaccaatcccgcccgccaaatgcggagcttaccgcctgcgtcattacccagggccacattcttggccaattgcaagccatcaacaaagcccgccaagagtttctgctacgaaagggacggggggtttacttggacccccagtccggcgaggagctcaacccaatccccccgccgccgcagccctatcagcagcagccgcgggcccttgcttcccaggatggcacccaaaaagaagctgcagctgccgccgccacccacggacgaggaggaatactgggacagtcaggcagaggaggttttggacgaggaggaggaggacatgatggaagactgggagagcctagacgaggaagcttccgaggtcgaagaggtgtcagacgaaacaccgtcaccctcggtcgcattcccctcgccggcgccccagaaatcggcaaccggttccagcatggctacaacctccgctcctcaggcgccgccggcactgcccgttcgccgacccaaccgtagatgggacaccactggaaccagggccggtaagtccaagcagccgccgccgttagcccaagagcaacaacagcgccaaggctaccgctcatggcgcgggcacaagaacgccatagttgcttgcttgcaagactgtgggggcaacatctccttcgcccgccgctttcttctctaccatcacggcgtggccttcccccgtaacatcctgcattactaccgtcatctctacagcccatactgcaccggcggcagcggcagcggcagcaacagcagcggccacacagaagcaaaggcgaccggatagcaagactctgacaaagcccaagaaatccacagcggcggcagcagcaggaggaggagcgctgcgtctggcgcccaacgaacccgtatcgacccgcgagcttagaaacaggatttttcccactctgtatgctatatttcaacagagcaggggccaagaacaagagctgaaaataaaaaacaggtctctgcgatccctcacccgcagctgcctgtatcacaaaagcgaagatcagcttcggcgcacgctggaagacgcggaggctctcttcagtaaatactgcgcgctgactcttaaggactagtttcgcgccctttctcaaatttaagcgcgaaaactacgtcatctccagcggccacacccggcgccagcacctgtcgtcagcgccattatgagcaaggaaattcccacgccctacatgtggagttaccagccacaaatgggacttgcggctggagctgcccaagactactcaacccgaataaactacatgagcgcgggaccccacatgatatcccgggtcaacggaatccgcgcccaccgaaaccgaattctcttggaacaggcggctattaccaccacacctcgtaataaccttaatccccgtagttggcccgctgccctggtgtaccaggaaagtcccgctcccaccactgtggtacttcccagagacgcccaggccgaagttcagatgactaactcaggggcgcagcttgcgggcggctttcgtcacagggtgcggtcgcccgggcagggtataactcacctgacaatcagagggcgaggtattcagctcaacgacgagtcggtgagctcctcgcttggtctccgtccggacgggacatttcagatcggcggcgccggccgtccttcattcacgcctcgtcaggcaatcctaactctgcagacctcgtcctctgagccgcgctctggaggcattggaactctgcaatttattgaggagtttgtgccatcggtctactttaaccccttctcgggacctcccggccactatccggatcaatttattcctaactttgacgcggtaaaggactcggcggacggctacgactgaatgttaagtggagaggcagagcaactgcgcctgaaacacctggtccactgtcgccgccacaagtgctttgcccgcgactccggtgagttttgctactttgaattgcccgaggatcatatcgagggcccggcgcacggcgtccggcttaccgcccagggagagcttgcccgtagcctgattcgggagtttacccagcgccccctgctagttgagcgggacaggggaccctgtgttctcactgtgatttgcaactgtcctaaccttggattacatcaagatctttgttgccatctctgtgctgagtataataaatacagaaattaaaatatactggggctcctatcgccatcctgtaaacgccaccgtcttcacccgcccaagcaaaccaaggcgaaccttacctggtacttttaacatctctccctctgtgatttacaacagtttcaacccagacggagtgagtctacgagagaacctctccgagctcagctactccatcagaaaaaacaccaccctccttacctgccgggaacgtacgagtgcgtcaccggccgctgcaccacacctaccgcctgaccgtaaaccagactttttccggacagacctcaataactctgtttaccagaacaggaggtgagcttagaaaacccttagggtattaggccaaaggcgcagctactgtggggtttatgaacaattcaagcaactctacgggctattctaattcaggtttctctagaaatggacggaattattacagagcagcgcctgctagaaagacgcagggcagcggccgagcaacagcgcatgaatcaagagctccaagacatggttaacttgcaccagtgcaaaaggggtatcttttgtctggtaaagcaggccaaagtcacctacgacagtaataccaccggacaccgccttagctacaagttgccaaccaagcgtcagaaattggtggtcatggtgggagaaaagcccattaccataactcagcactcggtagaaaccgaaggctgcattcactcaccttgtcaaggacctgaggatctctgcacccttattaagaccctgtgcggtctcaaagatcttattccctttaactaataaaaaaaaataataaagcatcacttacttaaaatcagttagcaaatttctgtccagtttattcagcagcacctccttgccctcctcccagctctggtattgcagcttcctcctggctgcaaactttctccacaatctaaatggaatgtcagtttcctcctgttcctgtccatccgcacccactatcttcatgttgttgcagatgaagcgcgcaagaccgtctgaagataccttcaaccccgtgtatccatatgacacggaaaccggtcctccaactgtgccttttcttactcctccctttgtatcccccaatgggtttcaagagagtccccctggggtactctctttgcgcctatccgaacctctagttacctccaatggcatgcttgcgctcaaaatgggcaacggcctctctctggacgaggccggcaaccttacctcccaaaatgtaaccactgtgagcccacctctcaaaaaaaccaagtcaaacataaacctggaaatatctgcacccctcacagttacctcagaagccctaactgtggctgccgccgcacctctaatggtcgcgggcaacacactcaccatgcaatcacaggccccgctaaccgtgcacgactccaaacttagcattgccacccaaggacccctcacagtgtcagaaggaaagctagccctgcaaacatcaggccccctcaccaccaccgatagcagtacccttactatcactgcctcaccccctctaactactgccactggtagcttgggcattgacttgaaagagcccatttatacacaaaatggaaaactaggactaaagtacggggctcctttgcatgtaacagacgacctaaacactttgaccgtagcaactggtccaggtgtgactattaataatacttccttgcaaactaaagttactggagccttgggttttgattcacaaggcaatatgcaacttaatgtagcaggaggactaaggattgattctcaaaacagacgccttatacttgatgttagttatccgtttgatgctcaaaaccaactaaatctaagactaggacagggccctctttttataaactcagcccacaacttggatattaactacaacaaaggcctttacttgtttacagcttcaaacaattccaaaaagcttgaggttaacctaagcactgccaaggggttgatgtttgacgctacagccatagccattaatgcaggagatgggcttgaatttggttcacctaatgcaccaaacacaaatcccctcaaaacaaaaattggccatggcctagaatttgattcaaacaaggctatggttcctaaactaggaactggccttagttttgacagcacaggtgccattacagtaggaaacaaaaataatgataagctaactttgtggaccacaccagctccatctcctaactgtagactaaatgcagagaaagatgctaaactcactttggtcttaacaaaatgtggcagtcaaatacttgctacagtttcagttttggctgttaaaggcagtttggctccaatatctggaacagttcaaagtgctcatcttattataagatttgacgaaaatggagtgctactaaacaattccttcctggacccagaatattggaactttagaaatggagatcttactgaaggcacagcctatacaaacgctgttggatttatgcctaacctatcagcttatccaaaatctcacggtaaaactgccaaaagtaacattgtcagtcaagtttacttaaacggagacaaaactaaacctgtaacactaaccattacactaaacggtacacaggaaacaggagacacaactccaagtgcatactctatgtcattttcatgggactggtctggccacaactacattaatgaaatatttgccacatcctcttacactttttcatacattgcccaagaataaagaatcgtttgtgttatgtttcaacgtgtttatttttcaattgcagaaaatttcgaatcatttttcattcagtagtatagccccaccaccacatagcttatacagatcaccgtaccttaatcaaactcacagaaccctagtattcaacctgccacctccctcccaacacacagagtacacagtcctttctccccggctggccttaaaaagcatcatatcatgggtaacagacatattcttaggtgttatattccacacggtttcctgtcgagccaaacgctcatcagtgatattaataaactccccgggcagctcacttaagttcatgtcgctgtccagctgctgagccacaggctgctgtccaacttgcggttgcttaacgggcggcgaaggagaagtccacgcctacatgggggtagagtcataatcgtgcatcaggatagggcggtggtgctgcagcagcgcgcgaataaactgctgccgccgccgctccgtcctgcaggaatacaacatggcagtggtctcctcagcgatgattcgcaccgcccgcagcataaggcgccttgtcctccgggcacagcagcgcaccctgatctcacttaaatcagcacagtaactgcagcacagcaccacaatattgttcaaaatcccacagtgcaaggcgctgtatccaaagctcatggcggggaccacagaacccacgtggccatcataccacaagcgcaggtagattaagtggcgacccctcataaacacgctggacataaacattacctcttttggcatgttgtaattcaccacctcccggtaccatataaacctctgattaaacatggcgccatccaccaccatcctaaaccagctggccaaaacctgcccgccggctatacactgcagggaaccgggactggaacaatgacagtggagagcccaggactcgtaaccatggatcatcatgctcgtcatgatatcaatgttggcacaacacaggcacacgtgcatacacttcctcaggattacaagctcctcccgcgttagaaccatatcccagggaacaacccattcctgaatcagcgtaaatcccacactgcagggaagacctcgcacgtaactcacgttgtgcattgtcaaagtgttacattcgggcagcagcggatgatcctccagtatggtagcgcgggtttctgtctcaaaaggaggtagacgatccctactgtacggagtgcgccgagacaaccgagatcgtgttggtcgtagtgtcatgccaaatggaacgccggacgtagtcatatttcctgaagcaaaaccaggtgcgggcgtgacaaacagatctgcgtctccggtctcgccgcttagatcgctctgtgtagtagttgtagtatatccactctctcaaagcatccaggcgccccctggcttcgggttctatgtaaactccttcatgcgccgctgccctgataacatccaccaccgcagaataagccacacccagccaacctacacattcgttctgcgagtcacacacgggaggagcgggaagagctggaagaaccatgtttttttttttattccaaaagattatccaaaacctcaaaatgaagatctattaagtgaacgcgctcccctccggtggcgtggtcaaactctacagccaaagaacagataatggcatttgtaagatgttgcacaatggcttccaaaaggcaaacggccctcacgtccaagtggacgtaaaggctaaacccttcagggtgaatctcctctataaacattccagcaccttcaaccatgcccaaataattctcatctcgccaccttctcaatatatctctaagcaaatcccgaatattaagtccggccattgtaaaaatctgctccagagcgccctccaccttcagcctcaagcagcgaatcatgattgcaaaaattcaggttcctcacagacctgtataagattcaaaagcggaacattaacaaaaataccgcgatcccgtaggtcccttcgcagggccagctgaacataatcgtgcaggtctgcacggaccagcgcggccacttccccgccaggaaccttgacaaaagaacccacactgattatgacacgcatactcggagctatgctaaccagcgtagccccgatgtaagctttgttgcatgggcggcgatataaaatgcaaggtgctgctcaaaaaatcaggcaaagcctcgcgcaaaaaagaaagcacatcgtagtcatgctcatgcagataaaggcaggtaagctccggaaccaccacagaaaaagacaccatttttctctcaaacatgtctgcgggtttctgcataaacacaaaataaaataacaaaaaaacatttaaacattagaagcctgtcttacaacaggaaaaacaacccttataagcataagacggactacggccatgccggcgtgaccgtaaaaaaactggtcaccgtgattaaaaagcaccaccgacagctcctcggtcatgtccggagtcataatgtaagactcggtaaacacatcaggttgattcacatcggtcagtgctaaaaagcgaccgaaatagcccgggggaatacatacccgcaggcgtagagacaacattacagcccccataggaggtataacaaaattaataggagagaaaaacacataaacacctgaaaaaccctcctgcctaggcaaaatagcaccctcccgctccagaacaacatacagcgcttccacagcggcagccataacagtcagccttaccagtaaaaaagaaaacctattaaaaaaacaccactcgacacggcaccagctcaatcagtcacagtgtaaaaaagggccaagtgcagagcgagtatatataggactaaaaaatgacgtaacggttaaagtccacaaaaaacacccagaaaaccgcacgcgaacctacgcccagaaacgaaagccaaaaaacccacaacttcctcaaatcgtcacttccgttttcccacgttacgtcacttcccattttaagaaaactacaattcccaacacatacaagttactccgccctaaaacctacgtcacccgccccgttcccacgccccgcgccacgtcacaaactccaccccctcattatcatattggcttcaatccaaaataaggtatattattgatgatgttaattaatttaaatccgcatgcgatatcgagctctcccgggaattcggatctgcgacgcgaggctggatggccttccccattatgattcttctcgcttccggcggcatcgggatgcccgcgttgcaggccatgctgtccaggcaggtagatgacgaccatcagggacagcttcacggccagcaaaaggccaggaaccgtaaaaaggccgcgttgctggcgtttttccataggctccgcccccctgacgagcatcacaaaaatcgacgctcaagtcagaggtggcgaaacccgacaggactataaagataccaggcgtttccccctggaagctccctcgtgcgctctcctgttccgaccctgccgcttaccggatacctgtccgcctttctcccttcgggaagcgtggcgctttctcaatgctcacgctgtaggtatctcagttcggtgtaggtcgttcgctccaagctgggctgtgtgcacgaaccccccgttcagcccgaccgctgcgccttatccggtaactatcgtcttgagtccaacccggtaagacacgacttatcgccactggcagcagccactggtaacaggattagcagagcgaggtatgtaggcggtgctacagagttcttgaagtggtggcctaactacggctacactagaaggacagtatttggtatctgcgctctgctgaagccagttaccttcggaaaaagagttggtagctcttgatccggcaaacaaaccaccgctggtagcggtggtttttttgtttgcaagcagcagattacgcgcagaaaaaaaggatctcaagaagatcctttgatcttttctacggggtctgacgctcagtggaacgaaaactcacgttaagggattttggtcatgagattatcaaaaaggatcttcacctagatccttttaaatcaatctaaagtatatatgagtaaacttggtctgacagttaccaatgcttaatcagtgaggcacctatctcagcgatctgtctatttcgttcatccatagttgcctgactccccgtcgtgtagataactacgatacgggagggcttaccatctggccccagtgctgcaatgataccgcgagacccacgctcaccggctccagatttatcagcaataaaccagccagccggaagggccgagcgcagaagtggtcctgcaactttatccgcctccatccagtctattaattgttgccgggaagctagagtaagtagttcgccagttaatagtttgcgcaacgttgttgccattgctgcaggcatcgtggtgtcacgctcgtcgtttggtatggcttcattcagctccggttcccaacgatcaaggcgagttacatgatcccccatgttgtgcaaaaaagcggttagctccttcggtcctccgatcgttgtcagaagtaagttggccgcagtgttatcactcatggttatggcagcactgcataattctcttactgtcatgccatccgtaagatgcttttctgtgactggtgagtactcaaccaagtcattctgagaatagtgtatgcggcgaccgagttgctcttgcccggcgtcaacacgggataataccgcgccacatagcagaactttaaaagtgctcatcattggaaaacgttcttcggggcgaaaactctcaaggatcttaccgctgttgagatccagttcgatgtaacccactcgtgcacccaactgatcttcagcatcttttactttcaccagcgtttctgggtgagcaaaaacaggaaggcaaaatgccgcaaaaaagggaataagggcgacacggaaatgttgaatactcatactcttcctttttcaatattattgaagcatttatcagggttattgtctcatgagcggatacatatttgaatgtatttagaaaaataaacaaataggggttccgcgcacatttccccgaaaagtgccacctgacgtctaagaaaccattattatcatgacattaacctataaaaataggcgtatcacgaggccctttcgtcttcaaggatccgaattcccgggagagctcgatatcgcatgcggatttaaattaattaa

SEQ ID NO: 47 - DNA, 582 bp, Artificial Sequence
  s4-1BBL construct
atgcccatggggtctctgcaaccgctggccaccttgtacctgctggggatgctggtcgcttcctgcctcggattggacctgcggcagggcatgtttgcgcagctggtggcccaaaatgttctgctgatcgatgggcccctgagctggtacagtgacccaggcctggcaggcgtgtccctgacggggggcctgagctacaaagaggacacgaaggagctggtggtggccaaggctggagtctactatgtcttctttcaactagagctgcggcgcgtggtggccggcgagggctcaggctccgtttcacttgcgctgcacctgcagccactgcgctctgctgctggggccgccgccctggctttgaccgtggacctgccacccgcctcctccgaggctcggaactcggccttcggtttccagggccgcttgctgcacctgagtgccggccagcgcctgggcgtccatcttcacactgaggccagggcacgccatgcctggcagcttacccagggcgccacagtcttgggactcttccgggtgacccccgaaatcccagccggactcccttcaccgaggtcggaa

SEQ ID NO: 48 - protein, 194 aa, Artificial Sequence
  s4-1BBL construct
MPMGSLQPLATLYLLGMLVASCLGLDLRQGMFAQLVAQNVLLIDGPLSWYSDPGLAGVSLTGGLSYKEDTKELVVAKAGVYYVFFQLELRRVVAGEGSGSVSLALHLQPLRSAAGAAALALTVDLPPASSEARNSAFGFQGRLLHLSAGQRLGVHLHTEARARHAWQLTQGATVLGLFRVTPEIPAGLPSPRSE

SEQ ID NO: 49 - DNA, 675 bp, Artificial Sequence
  s4-1BBL construct
atgcccatggggtctctgcaaccgctggccaccttgtacctgctggggatgctggtcgcttcctgcctcggaggctctggctccaactggagccacccccagttcgagaagggaggttctgggggccatcaccatcaccatcacggcggttcagggggaggatccttggacctgcggcagggcatgtttgcgcagctggtggcccaaaatgttctgctgatcgatgggcccctgagctggtacagtgacccaggcctggcaggcgtgtccctgacggggggcctgagctacaaagaggacacgaaggagctggtggtggccaaggctggagtctactatgtcttctttcaactagagctgcggcgcgtggtggccggcgagggctcaggctccgtttcacttgcgctgcacctgcagccactgcgctctgctgctggggccgccgccctggctttgaccgtggacctgccacccgcctcctccgaggctcggaactcggccttcggtttccagggccgcttgctgcacctgagtgccggccagcgcctgggcgtccatcttcacactgaggccagggcacgccatgcctggcagcttacccagggcgccacagtcttgggactcttccgggtgacccccgaaatcccagccggactcccttcaccgaggtcggaa

SEQ ID NO: 50 - protein, 225 aa, Artificial Sequence
  s4-1BBL construct
MPMGSLQPLATLYLLGMLVASCLGGSGSNWSHPQFEKGGSGGHHHHHHGGSGGGSLDLRQGMFAQLVAQNVLLIDGPLSWYSDPGLAGVSLTGGLSYKEDTKELVVAKAGVYYVFFQLELRRVVAGEGSGSVSLALHLQPLRSAAGAAALALTVDLPPASSEARNSAFGFQGRLLHLSAGQRLGVHLHTEARARHAWQLTQGATVLGLFRVTPEIPAGLPSPRSE

SEQ ID NO: 51 - DNA, 765 bp, Artificial Sequence
  s4-1BBL construct
atgcccatggggtctctgcaaccgctggccaccttgtacctgctggggatgctggtcgcttcctgcctcggaggctcacgaaacctcgttactgccttttcaaatatggatgacatgctgcaaaaggcgcacttggtcatcgaaggcacgtttatatacttgagagactctaccgagtttttcattcgggttcgagacggatggaaaaaattgcagcttggggaactgattccgatcccggcagacagtggatccttggacctgcggcagggcatgtttgcgcagctggtggcccaaaatgttctgctgatcgatgggcccctgagctggtacagtgacccaggcctggcaggcgtgtccctgacggggggcctgagctacaaagaggacacgaaggagctggtggtggccaaggctggagtctactatgtcttctttcaactagagctgcggcgcgtggtggccggcgagggctcaggctccgtttcacttgcgctgcacctgcagccactgcgctctgctgctggggccgccgccctggctttgaccgtggacctgccacccgcctcctccgaggctcggaactcggccttcggtttccagggccgcttgctgcacctgagtgccggccagcgcctgggcgtccatcttcacactgaggccagggcacgccatgcctggcagcttacccagggcgccacagtcttgggactcttccgggtgacccccgaaatcccagccggactcccttcaccgaggtcggaa

SEQ ID NO: 52 - protein, 255 aa, Artificial Sequence
  s4-1BBL construct
MPMGSLQPLATLYLLGMLVASCLGGSRNLVTAFSNMDDMLQKAHLVIEGTFIYLRDSTEFFIRVRDGWKKLQLGELIPIPADSGSLDLRQGMFAQLVAQNVLLIDGPLSWYSDPGLAGVSLTGGLSYKEDTKELVVAKAGVYYVFFQLELRRVVAGEGSGSVSLALHLQPLRSAAGAAALALTVDLPPASSEARNSAFGFQGRLLHLSAGQRLGVHLHTEARARHAWQLTQGATVLGLFRVTPEIPAGLPSPRSE

SEQ ID NO: 53 - DNA, 852 bp, Artificial Sequence
  s4-1BBL construct
atgcccatggggtctctgcaaccgctggccaccttgtacctgctggggatgctggtcgcttcctgcctcggaggctctggctccaactggagccacccccagttcgagaagggaggttctgggggccatcaccatcaccatcacggcggttcagggggaggctcacgaaacctcgttactgccttttcaaatatggatgacatgctgcaaaaggcgcacttggtcatcgaaggcacgtttatatacttgagagactctaccgagtttttcattcgggttcgagacggatggaaaaaattgcagcttggggaactgattccgatcccggcagacagtggatccttggacctgcggcagggcatgtttgcgcagctggtggcccaaaatgttctgctgatcgatgggcccctgagctggtacagtgacccaggcctggcaggcgtgtccctgacggggggcctgagctacaaagaggacacgaaggagctggtggtggccaaggctggagtctactatgtcttctttcaactagagctgcggcgcgtggtggccggcgagggctcaggctccgtttcacttgcgctgcacctgcagccactgcgctctgctgctggggccgccgccctggctttgaccgtggacctgccacccgcctcctccgaggctcggaactcggccttcggtttccagggccgcttgctgcacctgagtgccggccagcgcctgggcgtccatcttcacactgaggccagggcacgccatgcctggcagcttacccagggcgccacagtcttgggactcttccgggtgacccccgaaatcccagccggactcccttcaccgaggtcggaa

SEQ ID NO: 54 - protein, 284 aa, Artificial Sequence
  s4-1BBL construct
MPMGSLQPLATLYLLGMLVASCLGGSGSNWSHPQFEKGGSGGHHHHHHGGSGGGSRNLVTAFSNMDDMLQKAHLVIEGTFIYLRDSTEFFIRVRDGWKKLQLGELIPIPADSGSLDLRQGMFAQLVAQNVLLIDGPLSWYSDPGLAGVSLTGGLSYKEDTKELVVAKAGVYYVFFQLELRRVVAGEGSGSVSLALHLQPLRSAAGAAALALTVDLPPASSEARNSAFGFQGRLLHLSAGQRLGVHLHTEARARHAWQLTQGATVLGLFRVTPEIPAGLPSPRSE

SEQ ID NO: 55 - DNA, 849 bp, Artificial Sequence
  s4-1BBL construct
atgcccatggggtctctgcaaccgctggccaccttgtacctgctggggatgctggtcgcttcctgcctcggaggctctggctccaactggagccacccccagttcgagaagggaggttctgggggccatcaccatcaccatcacggcggttcagggggaggcgttcgactttgggctacaagacaggcaatgctgggccaggtccatgaggttcctgaggggtggctcattttcgtggccgagcaggaggagctgtatgttcgcgtgcaaaacggctttaggaaggtccagctggaagcgcggacacctttgcccaggggaaccgataacgagggatccttggacctgcggcagggcatgtttgcgcagctggtggcccaaaatgttctgctgatcgatgggcccctgagctggtacagtgacccaggcctggcaggcgtgtccctgacggggggcctgagctacaaagaggacacgaaggagctggtggtggccaaggctggagtctactatgtcttctttcaactagagctgcggcgcgtggtggccggcgagggctcaggctccgtttcacttgcgctgcacctgcagccactgcgctctgctgctggggccgccgccctggctttgaccgtggacctgccacccgcctcctccgaggctcggaactcggccttcggtttccagggccgcttgctgcacctgagtgccggccagcgcctgggcgtccatcttcacactgaggccagggcacgccatgcctggcagcttacccagggcgccacagtcttgggactcttccgggtgacccccgaaatcccagccggactcccttcaccgaggtcggaa

SEQ ID NO: 56 - protein, 283 aa, Artificial Sequence
  s4-1BBL construct
MPMGSLQPLATLYLLGMLVASCLGGSGSNWSHPQFEKGGSGGHHHHHHGGSGGGVRLWATRQAMLGQVHEVPEGWLIFVAEQEELYVRVQNGFRKVQLEARTPLPRGTDNEGSLDLRQGMFAQLVAQNVLLIDGPLSWYSDPGLAGVSLTGGLSYKEDTKELVVAKAGVYYVFFQLELRRVVAGEGSGSVSLALHLQPLRSAAGAAALALTVDLPPASSEARNSAFGFQGRLLHLSAGQRLGVHLHTEARARHAWQLTQGATVLGLFRVTPEIPAGLPSPRSE

SEQ ID NO: 57 - DNA, 762 bp, Artificial Sequence
  s4-1BBL construct
atgcccatggggtctctgcaaccgctggccaccttgtacctgctggggatgctggtcgcttcctgcctcggaggcgttcgactttgggctacaagacaggcaatgctgggccaggtccatgaggttcctgaggggtggctcattttcgtggccgagcaggaggagctgtatgttcgcgtgcaaaacggctttaggaaggtccagctggaagcgcggacacctttgcccaggggaaccgataacgagggatccttggacctgcggcagggcatgtttgcgcagctggtggcccaaaatgttctgctgatcgatgggcccctgagctggtacagtgacccaggcctggcaggcgtgtccctgacggggggcctgagctacaaagaggacacgaaggagctggtggtggccaaggctggagtctactatgtcttctttcaactagagctgcggcgcgtggtggccggcgagggctcaggctccgtttcacttgcgctgcacctgcagccactgcgctctgctgctggggccgccgccctggctttgaccgtggacctgccacccgcctcctccgaggctcggaactcggccttcggtttccagggccgcttgctgcacctgagtgccggccagcgcctgggcgtccatcttcacactgaggccagggcacgccatgcctggcagcttacccagggcgccacagtcttgggactcttccgggtgacccccgaaatcccagccggactcccttcaccgaggtcggaa

SEQ ID NO: 58 - protein, 254 aa, Artificial Sequence
  s4-1BBL construct
MPMGSLQPLATLYLLGMLVASCLGGVRLWATRQAMLGQVHEVPEGWLIFVAEQEELYVRVQNGFRKVQLEARTPLPRGTDNEGSLDLRQGMFAQLVAQNVLLIDGPLSWYSDPGLAGVSLTGGLSYKEDTKELVVAKAGVYYVFFQLELRRVVAGEGSGSVSLALHLQPLRSAAGAAALALTVDLPPASSEARNSAFGFQGRLLHLSAGQRLGVHLHTEARARHAWQLTQGATVLGLFRVTPEIPAGLPSPRSE

SEQ ID NO: 59 - DNA, 816 bp, Artificial Sequence
  s4-1BBL construct
atgcccatggggtctctgcaaccgctggccaccttgtacctgctggggatgctggtcgcttcctgcctcggatctggtgctggaggatcaggtggttctagtggaagtgatggtgctagcgggtctggcgttcgactttgggctacaagacaggcaatgctgggccaggtccatgaggttcctgaggggtggctcattttcgtggccgagcaggaggagctgtatgttcgcgtgcaaaacggctttaggaaggtccagctggaagcgcggacacctttgcccaggggaaccgataacgagggatccttggacctgcggcagggcatgtttgcgcagctggtggcccaaaatgttctgctgatcgatgggcccctgagctggtacagtgacccaggcctggcaggcgtgtccctgacggggggcctgagctacaaagaggacacgaaggagctggtggtggccaaggctggagtctactatgtcttctttcaactagagctgcggcgcgtggtggccggcgagggctcaggctccgtttcacttgcgctgcacctgcagccactgcgctctgctgctggggccgccgccctggctttgaccgtggacctgccacccgcctcctccgaggctcggaactcggccttcggtttccagggccgcttgctgcacctgagtgccggccagcgcctgggcgtccatcttcacactgaggccagggcacgccatgcctggcagcttacccagggcgccacagtcttgggactcttccgggtgacccccgaaatcccagccggactcccttcaccgaggtcggaa

SEQ ID NO: 60 - protein, 272 aa, Artificial Sequence
  s4-1BBL construct
MPMGSLQPLATLYLLGMLVASCLGSGAGGSGGSSGSDGASGSGVRLWATRQAMLGQVHEVPEGWLIFVAEQEELYVRVQNGFRKVQLEARTPLPRGTDNEGSLDLRQGMFAQLVAQNVLLIDGPLSWYSDPGLAGVSLTGGLSYKEDTKELVVAKAGVYYVFFQLELRRVVAGEGSGSVSLALHLQPLRSAAGAAALALTVDLPPASSEARNSAFGFQGRLLHLSAGQRLGVHLHTEARARHAWQLTQGATVLGLFRVTPEIPAGLPSPRSE

SEQ ID NO: 61 - DNA, 1695 bp, Artificial Sequence
  s4-1BBL-TriXV DNA without tags
atgcccatgggatcattgcaacctctggctacactgtacctgctcggcatgttggtggccagttgcttgggccttgatcttcgacaagggatgtttgcacagctcgtagcacaaaacgttctgctcatcgacggccccttgtcctggtactcagacccaggattggccggtgtcagtcttaccggcggactcagctacaaggaggacactaaagagttggtcgtggcaaaggcaggcgtgtattatgtgttcttccaactggaactgaggagggttgtggccggtgaaggcagcggttccgtcagtttggcgctgcacctgcagcctttgaggagtgccgcaggtgctgctgcattggctctgactgtcgacctgccacctgcctcatccgaggctagaaattctgcctttggatttcaaggcagactgttgcatctgtcagcagggcagagacttggggtgcacctccatactgaggcaagagctagacacgcttggcagctcacccaaggggccactgttcttggactcttccgggtgacaccagagatacccgcaggactcccaagtccaaggagtgaaggcggtggcggaagcggtggaggtggatctggcggaggtggaagtcttgacctgcggcagggcatgttcgctcaattggtggcccagaatgttcttctgatcgatggtcctctgtcttggtattctgatcctggcttggcaggggtgtcacttactggtggtctttcatataaagaagacacaaaggagctcgtggtggctaaagctggagtttattacgtgttttttcaattggaactccggagagtggttgccggcgaaggttccggttctgtttctcttgctctgcacttgcaaccactgagaagtgctgcaggcgcagctgctttggctttgaccgtggatttgcctcctgcttcttccgaagccagaaacagcgcttttggctttcaaggaaggctcctgcatctctctgccggccaacgactgggagtgcatttgcacactgaagcacgcgcaagacatgcatggcagcttactcaaggagctacggtgctcggattgtttcgggtcacccctgagatacctgctgggctgcctagtcctagatcagaaggaggtggtggctctggtggaggaggttctggagggggaggaagcctggatctgcgacaaggcatgtttgcccagctcgttgcacaaaatgtgctgctgatcgacggacctctctcctggtattccgatcccgggttggctggagttagtctcacgggaggactgtcctacaaagaagatacgaaggaactcgtggtcgcaaaagctggggtttactacgtttttttccaacttgagctgcggagagttgtcgccggagaagggagcggatctgtatcattggcacttcaccttcagccgctcagatctgctgcaggtgccgctgcacttgctttgactgtggatctgcctccagcctcttctgaagcccgcaactctgcgtttggattccaagggagactgctccacctcagtgctggccaaagacttggagtccatctgcacacagaagcgagagccagacatgcctggcagctcactcagggggctactgtcctcggactgtttagagtcactccagaaataccagccggcctgccttcacctcgaagcgaataa

SEQ ID NO: 62 - protein, 564 aa, Artificial Sequence
  s4-1BBL construct
MPMGSLQPLATLYLLGMLVASCLGLDLRQGMFAQLVAQNVLLIDGPLSWYSDPGLAGVSLTGGLSYKEDTKELVVAKAGVYYVFFQLELRRVVAGEGSGSVSLALHLQPLRSAAGAAALALTVDLPPASSEARNSAFGFQGRLLHLSAGQRLGVHLHTEARARHAWQLTQGATVLGLFRVTPEIPAGLPSPRSEGGGGSGGGGSGGGGSLDLRQGMFAQLVAQNVLLIDGPLSWYSDPGLAGVSLTGGLSYKEDTKELVVAKAGVYYVFFQLELRRVVAGEGSGSVSLALHLQPLRSAAGAAALALTVDLPPASSEARNSAFGFQGRLLHLSAGQRLGVHLHTEARARHAWQLTQGATVLGLFRVTPEIPAGLPSPRSEGGGGSGGGGSGGGGSLDLRQGMFAQLVAQNVLLIDGPLSWYSDPGLAGVSLTGGLSYKEDTKELVVAKAGVYYVFFQLELRRVVAGEGSGSVSLALHLQPLRSAAGAAALALTVDLPPASSEARNSAFGFQGRLLHLSAGQRLGVHLHTEARARHAWQLTQGATVLGLFRVTPEIPAGLPSPRSE

SEQ ID NO: 63 - DNA, 1785 bp, Artificial Sequence
  s4-1BBL construct
atgcccatgggatcattgcaacctctggctacactgtacctgctcggcatgttggtggccagttgcttgggcggcagcggatcaaattggagtcatccccagttcgagaagggcggcagtggaggacatcaccatcatcaccatggcgggagcggtggaggctctcttgatcttcgacaagggatgtttgcacagctcgtagcacaaaacgttctgctcatcgacggccccttgtcctggtactcagacccaggattggccggtgtcagtcttaccggcggactcagctacaaggaggacactaaagagttggtcgtggcaaaggcaggcgtgtattatgtgttcttccaactggaactgaggagggttgtggccggtgaaggcagcggttccgtcagtttggcgctgcacctgcagcctttgaggagtgccgcaggtgctgctgcattggctctgactgtcgacctgccacctgcctcatccgaggctagaaattctgcctttggatttcaaggcagactgttgcatctgtcagcagggcagagacttggggtgcacctccatactgaggcaagagctagacacgcttggcagctcacccaaggggccactgttcttggactcttccgggtgacaccagagatacccgcaggactcccaagtccaaggagtgaaggcggtggcggaagcggtggaggtggatctggcggaggtggaagtcttgacctgcggcagggcatgttcgctcaattggtggcccagaatgttcttctgatcgatggtcctctgtcttggtattctgatcctggcttggcaggggtgtcacttactggtggtctttcatataaagaagacacaaaggagctcgtggtggctaaagctggagtttattacgtgttttttcaattggaactccggagagtggttgccggcgaaggttccggttctgtttctcttgctctgcacttgcaaccactgagaagtgctgcaggcgcagctgctttggctttgaccgtggatttgcctcctgcttcttccgaagccagaaacagcgcttttggctttcaaggaaggctcctgcatctctctgccggccaacgactgggagtgcatttgcacactgaagcacgcgcaagacatgcatggcagcttactcaaggagctacggtgctcggattgtttcgggtcacccctgagatacctgctgggctgcctagtcctagatcagaaggaggtggtggctctggtggaggaggttctggagggggaggaagcctggatctgcgacaaggcatgtttgcccagctcgttgcacaaaatgtgctgctgatcgacggacctctctcctggtattccgatcccgggttggctggagttagtctcacgggaggactgtcctacaaagaagatacgaaggaactcgtggtcgcaaaagctggggtttactacgtttttttccaacttgagctgcggagagttgtcgccggagaagggagcggatctgtatcattggcacttcaccttcagccgctcagatctgctgcaggtgccgctgcacttgctttgactgtggatctgcctccagcctcttctgaagcccgcaactctgcgtttggattccaagggagactgctccacctcagtgctggccaaagacttggagtccatctgcacacagaagcgagagccagacatgcctggcagctcactcagggggctactgtcctcggactgtttagagtcactccagaaataccagccggcctgccttcacctcgaagcgaa

SEQ ID NO: 64 - protein, 595 aa, Artificial Sequence
  s4-1BBL construct
MPMGSLQPLATLYLLGMLVASCLGGSGSNWSHPQFEKGGSGGHHHHHHGGSGGGSLDLRQGMFAQLVAQNVLLIDGPLSWYSDPGLAGVSLTGGLSYKEDTKELVVAKAGVYYVFFQLELRRVVAGEGSGSVSLALHLQPLRSAAGAAALALTVDLPPASSEARNSAFGFQGRLLHLSAGQRLGVHLHTEARARHAWQLTQGATVLGLFRVTPEIPAGLPSPRSEGGGGSGGGGSGGGGSLDLRQGMFAQLVAQNVLLIDGPLSWYSDPGLAGVSLTGGLSYKEDTKELVVAKAGVYYVFFQLELRRVVAGEGSGSVSLALHLQPLRSAAGAAALALTVDLPPASSEARNSAFGFQGRLLHLSAGQRLGVHLHTEARARHAWQLTQGATVLGLFRVTPEIPAGLPSPRSEGGGGSGGGGSGGGGSLDLRQGMFAQLVAQNVLLIDGPLSWYSDPGLAGVSLTGGLSYKEDTKELVVAKAGVYYVFFQLELRRVVAGEGSGSVSLALHLQPLRSAAGAAALALTVDLPPASSEARNSAFGFQGRLLHLSAGQRLGVHLHTEARARHAWQLTQGATVLGLFRVTPEIPAGLPSPRSE

SEQ ID NO: 65 - DNA, 1875 bp, Artificial Sequence
  s4-1BBL-Triple TriXVIII
atgcccatgggatcattgcaacctctggctacactgtacctgctcggcatgttggtggccagttgcttgggcggcgttcgactttgggctacaagacaggcaatgctgggccaggtccatgaggttcctgaggggtggctcattttcgtggccgagcaggaggagctgtatgttcgcgtgcaaaacggctttaggaaggtccagctggaagcgcggacacctttgcccaggggaaccgataacgagggctcacttgatcttcgacaagggatgtttgcacagctcgtagcacaaaacgttctgctcatcgacggccccttgtcctggtactcagacccaggattggccggtgtcagtcttaccggcggactcagctacaaggaggacactaaagagttggtcgtggcaaaggcaggcgtgtattatgtgttcttccaactggaactgaggagggttgtggccggtgaaggcagcggttccgtcagtttggcgctgcacctgcagcctttgaggagtgccgcaggtgctgctgcattggctctgactgtcgacctgccacctgcctcatccgaggctagaaattctgcctttggatttcaaggcagactgttgcatctgtcagcagggcagagacttggggtgcacctccatactgaggcaagagctagacacgcttggcagctcacccaaggggccactgttcttggactcttccgggtgacaccagagatacccgcaggactcccaagtccaaggagtgaaggcggtggcggaagcggtggaggtggatctggcggaggtggaagtcttgacctgcggcagggcatgttcgctcaattggtggcccagaatgttcttctgatcgatggtcctctgtcttggtattctgatcctggcttggcaggggtgtcacttactggtggtctttcatataaagaagacacaaaggagctcgtggtggctaaagctggagtttattacgtgttttttcaattggaactccggagagtggttgccggcgaaggttccggttctgtttctcttgctctgcacttgcaaccactgagaagtgctgcaggcgcagctgctttggctttgaccgtggatttgcctcctgcttcttccgaagccagaaacagcgcttttggctttcaaggaaggctcctgcatctctctgccggccaacgactgggagtgcatttgcacactgaagcacgcgcaagacatgcatggcagcttactcaaggagctacggtgctcggattgtttcgggtcacccctgagatacctgctgggctgcctagtcctagatcagaaggaggtggtggctctggtggaggaggttctggagggggaggaagcctggatctgcgacaaggcatgtttgcccagctcgttgcacaaaatgtgctgctgatcgacggacctctctcctggtattccgatcccgggttggctggagttagtctcacgggaggactgtcctacaaagaagatacgaaggaactcgtggtcgcaaaagctggggtttactacgtttttttccaacttgagctgcggagagttgtcgccggagaagggagcggatctgtatcattggcacttcaccttcagccgctcagatctgctgcaggtgccgctgcacttgctttgactgtggatctgcctccagcctcttctgaagcccgcaactctgcgtttggattccaagggagactgctccacctcagtgctggccaaagacttggagtccatctgcacacagaagcgagagccagacatgcctggcagctcactcagggggctactgtcctcggactgtttagagtcactccagaaataccagccggcctgccttcacctcgaagcgaataa

SEQ ID NO: 66 - protein, 624 aa, Artificial Sequence
  s4-1BBL construct
MPMGSLQPLATLYLLGMLVASCLGGVRLWATRQAMLGQVHEVPEGWLIFVAEQEELYVRVQNGFRKVQLEARTPLPRGTDNEGSLDLRQGMFAQLVAQNVLLIDGPLSWYSDPGLAGVSLTGGLSYKEDTKELVVAKAGVYYVFFQLELRRVVAGEGSGSVSLALHLQPLRSAAGAAALALTVDLPPASSEARNSAFGFQGRLLHLSAGQRLGVHLHTEARARHAWQLTQGATVLGLFRVTPEIPAGLPSPRSEGGGGSGGGGSGGGGSLDLRQGMFAQLVAQNVLLIDGPLSWYSDPGLAGVSLTGGLSYKEDTKELVVAKAGVYYVFFQLELRRVVAGEGSGSVSLALHLQPLRSAAGAAALALTVDLPPASSEARNSAFGFQGRLLHLSAGQRLGVHLHTEARARHAWQLTQGATVLGLFRVTPEIPAGLPSPRSEGGGGSGGGGSGGGGSLDLRQGMFAQLVAQNVLLIDGPLSWYSDPGLAGVSLTGGLSYKEDTKELVVAKAGVYYVFFQLELRRVVAGEGSGSVSLALHLQPLRSAAGAAALALTVDLPPASSEARNSAFGFQGRLLHLSAGQRLGVHLHTEARARHAWQLTQGATVLGLFRVTPEIPAGLPSPRSE

SEQ ID NO: 67 - DNA, 1929 bp, Artificial Sequence
  s4-1BBL-Triple TriXVIII linker
atgcccatgggatcattgcaacctctggctacactgtacctgctcggcatgttggtggccagttgcttgggctctggtgctggaggatcaggtggttctagtggaagtgatggtgctagcgggtctggcgttcgactttgggctacaagacaggcaatgctgggccaggtccatgaggttcctgaggggtggctcattttcgtggccgagcaggaggagctgtatgttcgcgtgcaaaacggctttaggaaggtccagctggaagcgcggacacctttgcccaggggaaccgataacgagggctcacttgatcttcgacaagggatgtttgcacagctcgtagcacaaaacgttctgctcatcgacggccccttgtcctggtactcagacccaggattggccggtgtcagtcttaccggcggactcagctacaaggaggacactaaagagttggtcgtggcaaaggcaggcgtgtattatgtgttcttccaactggaactgaggagggttgtggccggtgaaggcagcggttccgtcagtttggcgctgcacctgcagcctttgaggagtgccgcaggtgctgctgcattggctctgactgtcgacctgccacctgcctcatccgaggctagaaattctgcctttggatttcaaggcagactgttgcatctgtcagcagggcagagacttggggtgcacctccatactgaggcaagagctagacacgcttggcagctcacccaaggggccactgttcttggactcttccgggtgacaccagagatacccgcaggactcccaagtccaaggagtgaaggcggtggcggaagcggtggaggtggatctggcggaggtggaagtcttgacctgcggcagggcatgttcgctcaattggtggcccagaatgttcttctgatcgatggtcctctgtcttggtattctgatcctggcttggcaggggtgtcacttactggtggtctttcatataaagaagacacaaaggagctcgtggtggctaaagctggagtttattacgtgttttttcaattggaactccggagagtggttgccggcgaaggttccggttctgtttctcttgctctgcacttgcaaccactgagaagtgctgcaggcgcagctgctttggctttgaccgtggatttgcctcctgcttcttccgaagccagaaacagcgcttttggctttcaaggaaggctcctgcatctctctgccggccaacgactgggagtgcatttgcacactgaagcacgcgcaagacatgcatggcagcttactcaaggagctacggtgctcggattgtttcgggtcacccctgagatacctgctgggctgcctagtcctagatcagaaggaggtggtggctctggtggaggaggttctggagggggaggaagcctggatctgcgacaaggcatgtttgcccagctcgttgcacaaaatgtgctgctgatcgacggacctctctcctggtattccgatcccgggttggctggagttagtctcacgggaggactgtcctacaaagaagatacgaaggaactcgtggtcgcaaaagctggggtttactacgtttttttccaacttgagctgcggagagttgtcgccggagaagggagcggatctgtatcattggcacttcaccttcagccgctcagatctgctgcaggtgccgctgcacttgctttgactgtggatctgcctccagcctcttctgaagcccgcaactctgcgtttggattccaagggagactgctccacctcagtgctggccaaagacttggagtccatctgcacacagaagcgagagccagacatgcctggcagctcactcagggggctactgtcctcggactgtttagagtcactccagaaataccagccggcctgccttcacctcgaagcgaataa

SEQ ID NO: 68 - protein, 642 aa, Artificial Sequence
  s4-1BBL construct
MPMGSLQPLATLYLLGMLVASCLGSGAGGSGGSSGSDGASGSGVRLWATRQAMLGQVHEVPEGWLIFVAEQEELYVRVQNGFRKVQLEARTPLPRGTDNEGSLDLRQGMFAQLVAQNVLLIDGPLSWYSDPGLAGVSLTGGLSYKEDTKELVVAKAGVYYVFFQLELRRVVAGEGSGSVSLALHLQPLRSAAGAAALALTVDLPPASSEARNSAFGFQGRLLHLSAGQRLGVHLHTEARARHAWQLTQGATVLGLFRVTPEIPAGLPSPRSEGGGGSGGGGSGGGGSLDLRQGMFAQLVAQNVLLIDGPLSWYSDPGLAGVSLTGGLSYKEDTKELVVAKAGVYYVFFQLELRRVVAGEGSGSVSLALHLQPLRSAAGAAALALTVDLPPASSEARNSAFGFQGRLLHLSAGQRLGVHLHTEARARHAWQLTQGATVLGLFRVTPEIPAGLPSPRSEGGGGSGGGGSGGGGSLDLRQGMFAQLVAQNVLLIDGPLSWYSDPGLAGVSLTGGLSYKEDTKELVVAKAGVYYVFFQLELRRVVAGEGSGSVSLALHLQPLRSAAGAAALALTVDLPPASSEARNSAFGFQGRLLHLSAGQRLGVHLHTEARARHAWQLTQGATVLGLFRVTPEIPAGLPSPRSE

SEQ ID NO: 69 - DNA, 2019 bp, Artificial Sequence
  s4-1BBL construct
atgcccatgggatcattgcaacctctggctacactgtacctgctcggcatgttggtggccagttgcttgggcggcagcggatcaaattggagtcatccccagttcgagaagggcggcagtggaggacatcaccatcatcaccatggcgggagcggtggaggctcttctggtgctggaggatcaggtggttctagtggaagtgatggtgctagcgggtctggcgttcgactttgggctacaagacaggcaatgctgggccaggtccatgaggttcctgaggggtggctcattttcgtggccgagcaggaggagctgtatgttcgcgtgcaaaacggctttaggaaggtccagctggaagcgcggacacctttgcccaggggaaccgataacgagggctcacttgatcttcgacaagggatgtttgcacagctcgtagcacaaaacgttctgctcatcgacggccccttgtcctggtactcagacccaggattggccggtgtcagtcttaccggcggactcagctacaaggaggacactaaagagttggtcgtggcaaaggcaggcgtgtattatgtgttcttccaactggaactgaggagggttgtggccggtgaaggcagcggttccgtcagtttggcgctgcacctgcagcctttgaggagtgccgcaggtgctgctgcattggctctgactgtcgacctgccacctgcctcatccgaggctagaaattctgcctttggatttcaaggcagactgttgcatctgtcagcagggcagagacttggggtgcacctccatactgaggcaagagctagacacgcttggcagctcacccaaggggccactgttcttggactcttccgggtgacaccagagatacccgcaggactcccaagtccaaggagtgaaggcggtggcggaagcggtggaggtggatctggcggaggtggaagtcttgacctgcggcagggcatgttcgctcaattggtggcccagaatgttcttctgatcgatggtcctctgtcttggtattctgatcctggcttggcaggggtgtcacttactggtggtctttcatataaagaagacacaaaggagctcgtggtggctaaagctggagtttattacgtgttttttcaattggaactccggagagtggttgccggcgaaggttccggttctgtttctcttgctctgcacttgcaaccactgagaagtgctgcaggcgcagctgctttggctttgaccgtggatttgcctcctgcttcttccgaagccagaaacagcgcttttggctttcaaggaaggctcctgcatctctctgccggccaacgactgggagtgcatttgcacactgaagcacgcgcaagacatgcatggcagcttactcaaggagctacggtgctcggattgtttcgggtcacccctgagatacctgctgggctgcctagtcctagatcagaaggaggtggtggctctggtggaggaggttctggagggggaggaagcctggatctgcgacaaggcatgtttgcccagctcgttgcacaaaatgtgctgctgatcgacggacctctctcctggtattccgatcccgggttggctggagttagtctcacgggaggactgtcctacaaagaagatacgaaggaactcgtggtcgcaaaagctggggtttactacgtttttttccaacttgagctgcggagagttgtcgccggagaagggagcggatctgtatcattggcacttcaccttcagccgctcagatctgctgcaggtgccgctgcacttgctttgactgtggatctgcctccagcctcttctgaagcccgcaactctgcgtttggattccaagggagactgctccacctcagtgctggccaaagacttggagtccatctgcacacagaagcgagagccagacatgcctggcagctcactcagggggctactgtcctcggactgtttagagtcactccagaaataccagccggcctgccttcacctcgaagcgaa

SEQ ID NO: 70 - protein, 673 aa, Artificial Sequence
  s4-1BBL construct
MPMGSLQPLATLYLLGMLVASCLGGSGSNWSHPQFEKGGSGGHHHHHHGGSGGGSSGAGGSGGSSGSDGASGSGVRLWATRQAMLGQVHEVPEGWLIFVAEQEELYVRVQNGFRKVQLEARTPLPRGTDNEGSLDLRQGMFAQLVAQNVLLIDGPLSWYSDPGLAGVSLTGGLSYKEDTKELVVAKAGVYYVFFQLELRRVVAGEGSGSVSLALHLQPLRSAAGAAALALTVDLPPASSEARNSAFGFQGRLLHLSAGQRLGVHLHTEARARHAWQLTQGATVLGLFRVTPEIPAGLPSPRSEGGGGSGGGGSGGGGSLDLRQGMFAQLVAQNVLLIDGPLSWYSDPGLAGVSLTGGLSYKEDTKELVVAKAGVYYVFFQLELRRVVAGEGSGSVSLALHLQPLRSAAGAAALALTVDLPPASSEARNSAFGFQGRLLHLSAGQRLGVHLHTEARARHAWQLTQGATVLGLFRVTPEIPAGLPSPRSEGGGGSGGGGSGGGGSLDLRQGMFAQLVAQNVLLIDGPLSWYSDPGLAGVSLTGGLSYKEDTKELVVAKAGVYYVFFQLELRRVVAGEGSGSVSLALHLQPLRSAAGAAALALTVDLPPASSEARNSAFGFQGRLLHLSAGQRLGVHLHTEARARHAWQLTQGATVLGLFRVTPEIPAGLPSPRSE

SEQ ID NO: 71 - DNA, 1962 bp, Artificial Sequence
  s4-1BBL construct
atgcccatgggatcattgcaacctctggctacactgtacctgctcggcatgttggtggccagttgcttgggcggcagcggatcaaattggagtcatccccagttcgagaagggcggcagtggaggacatcaccatcatcaccatggcgggagcggtggaggcgttcgactttgggctacaagacaggcaatgctgggccaggtccatgaggttcctgaggggtggctcattttcgtggccgagcaggaggagctgtatgttcgcgtgcaaaacggctttaggaaggtccagctggaagcgcggacacctttgcccaggggaaccgataacgagggctcacttgatcttcgacaagggatgtttgcacagctcgtagcacaaaacgttctgctcatcgacggccccttgtcctggtactcagacccaggattggccggtgtcagtcttaccggcggactcagctacaaggaggacactaaagagttggtcgtggcaaaggcaggcgtgtattatgtgttcttccaactggaactgaggagggttgtggccggtgaaggcagcggttccgtcagtttggcgctgcacctgcagcctttgaggagtgccgcaggtgctgctgcattggctctgactgtcgacctgccacctgcctcatccgaggctagaaattctgcctttggatttcaaggcagactgttgcatctgtcagcagggcagagacttggggtgcacctccatactgaggcaagagctagacacgcttggcagctcacccaaggggccactgttcttggactcttccgggtgacaccagagatacccgcaggactcccaagtccaaggagtgaaggcggtggcggaagcggtggaggtggatctggcggaggtggaagtcttgacctgcggcagggcatgttcgctcaattggtggcccagaatgttcttctgatcgatggtcctctgtcttggtattctgatcctggcttggcaggggtgtcacttactggtggtctttcatataaagaagacacaaaggagctcgtggtggctaaagctggagtttattacgtgttttttcaattggaactccggagagtggttgccggcgaaggttccggttctgtttctcttgctctgcacttgcaaccactgagaagtgctgcaggcgcagctgctttggctttgaccgtggatttgcctcctgcttcttccgaagccagaaacagcgcttttggctttcaaggaaggctcctgcatctctctgccggccaacgactgggagtgcatttgcacactgaagcacgcgcaagacatgcatggcagcttactcaaggagctacggtgctcggattgtttcgggtcacccctgagatacctgctgggctgcctagtcctagatcagaaggaggtggtggctctggtggaggaggttctggagggggaggaagcctggatctgcgacaaggcatgtttgcccagctcgttgcacaaaatgtgctgctgatcgacggacctctctcctggtattccgatcccgggttggctggagttagtctcacgggaggactgtcctacaaagaagatacgaaggaactcgtggtcgcaaaagctggggtttactacgtttttttccaacttgagctgcggagagttgtcgccggagaagggagcggatctgtatcattggcacttcaccttcagccgctcagatctgctgcaggtgccgctgcacttgctttgactgtggatctgcctccagcctcttctgaagcccgcaactctgcgtttggattccaagggagactgctccacctcagtgctggccaaagacttggagtccatctgcacacagaagcgagagccagacatgcctggcagctcactcagggggctactgtcctcggactgtttagagtcactccagaaataccagccggcctgccttcacctcgaagcgaataa

SEQ ID NO: 72 - protein, 303 aa, Artificial Sequence
  s4-1BBL construct
MPMGSLQPLATLYLLGMLVASCLGGSGSNWSHPQFEKGGSGGHHHHHHGGSGGTRSGAGGSGGSSGSDGASGSGVRLWATRQAMLGQVHEVPEGWLIFVAEQEELYVRVQNGFRKVQLEARTPLPRGTDNEGSLDLRQGMFAQLVAQNVLLIDGPLSWYSDPGLAGVSLTGGLSYKEDTKELVVAKAGVYYVFFQLELRRVVAGEGSGSVSLALHLQPLRSAAGAAALALTVDLPPASSEARNSAFGFQGRLLHLSAGQRLGVHLHTEARARHAWQLTQGATVLGLFRVTPEIPAGLPSPRSE

SEQ ID NO: 73 - DNA, 912 bp, Artificial Sequence
  s4-1BBL construct
atgcccatggggtctctgcaaccgctggccaccttgtacctgctggggatgctggtcgcttcctgcctcggaggctctggctccaactggagccacccccagttcgagaagggaggttctgggggccatcaccatcaccatcacggcggttcagggggaacgcgttctggtgctggaggatcaggtggttctagtggaagtgatggtgctagcgggtctggcgttcgactttgggctacaagacaggcaatgctgggccaggtccatgaggttcctgaggggtggctcattttcgtggccgagcaggaggagctgtatgttcgcgtgcaaaacggctttaggaaggtccagctggaagcgcggacacctttgcccaggggaaccgataacgagggatccttggacctgcggcagggcatgtttgcgcagctggtggcccaaaatgttctgctgatcgatgggcccctgagctggtacagtgacccaggcctggcaggcgtgtccctgacggggggcctgagctacaaagaggacacgaaggagctggtggtggccaaggctggagtctactatgtcttctttcaactagagctgcggcgcgtggtggccggcgagggctcaggctccgtttcacttgcgctgcacctgcagccactgcgctctgctgctggggccgccgccctggctttgaccgtggacctgccacccgcctcctccgaggctcggaactcggccttcggtttccagggccgcttgctgcacctgagtgccggccagcgcctgggcgtccatcttcacactgaggccagggcacgccatgcctggcagcttacccagggcgccacagtcttgggactcttccgggtgacccccgaaatcccagccggactcccttcaccgaggtcggaataa

SEQ ID NO: 74 - protein, 673 aa, Artificial Sequence; identical to SEQ ID NO: 70
  s4-1BBL construct

SEQ ID NO: 75 - DNA, 2022 bp, Artificial Sequence
  s4-1BBL construct
atgcccatgggatcattgcaacctctggctacactgtacctgctcggcatgttggtggccagttgcttgggcggcagcggatcaaattggagtcatccccagttcgagaagggcggcagtggaggacatcaccatcatcaccatggcgggagcggtggaggctcttctggtgctggaggatcaggtggttctagtggaagtgatggtgctagcgggtctggcgttcgactttgggctacaagacaggcaatgctgggccaggtccatgaggttcctgaggggtggctcattttcgtggccgagcaggaggagctgtatgttcgcgtgcaaaacggctttaggaaggtccagctggaagcgcggacacctttgcccaggggaaccgataacgagggctcacttgatcttcgacaagggatgtttgcacagctcgtagcacaaaacgttctgctcatcgacggccccttgtcctggtactcagacccaggattggccggtgtcagtcttaccggcggactcagctacaaggaggacactaaagagttggtcgtggcaaaggcaggcgtgtattatgtgttcttccaactggaactgaggagggttgtggccggtgaaggcagcggttccgtcagtttggcgctgcacctgcagcctttgaggagtgccgcaggtgctgctgcattggctctgactgtcgacctgccacctgcctcatccgaggctagaaattctgcctttggatttcaaggcagactgttgcatctgtcagcagggcagagacttggggtgcacctccatactgaggcaagagctagacacgcttggcagctcacccaaggggccactgttcttggactcttccgggtgacaccagagatacccgcaggactcccaagtccaaggagtgaaggcggtggcggaagcggtggaggtggatctggcggaggtggaagtcttgacctgcggcagggcatgttcgctcaattggtggcccagaatgttcttctgatcgatggtcctctgtcttggtattctgatcctggcttggcaggggtgtcacttactggtggtctttcatataaagaagacacaaaggagctcgtggtggctaaagctggagtttattacgtgttttttcaattggaactccggagagtggttgccggcgaaggttccggttctgtttctcttgctctgcacttgcaaccactgagaagtgctgcaggcgcagctgctttggctttgaccgtggatttgcctcctgcttcttccgaagccagaaacagcgcttttggctttcaaggaaggctcctgcatctctctgccggccaacgactgggagtgcatttgcacactgaagcacgcgcaagacatgcatggcagcttactcaaggagctacggtgctcggattgtttcgggtcacccctgagatacctgctgggctgcctagtcctagatcagaaggaggtggtggctctggtggaggaggttctggagggggaggaagcctggatctgcgacaaggcatgtttgcccagctcgttgcacaaaatgtgctgctgatcgacggacctctctcctggtattccgatcccgggttggctggagttagtctcacgggaggactgtcctacaaagaagatacgaaggaactcgtggtcgcaaaagctggggtttactacgtttttttccaacttgagctgcggagagttgtcgccggagaagggagcggatctgtatcattggcacttcaccttcagccgctcagatctgctgcaggtgccgctgcacttgctttgactgtggatctgcctccagcctcttctgaagcccgcaactctgcgtttggattccaagggagactgctccacctcagtgctggccaaagacttggagtccatctgcacacagaagcgagagccagacatgcctggcagctcactcagggggctactgtcctcggactgtttagagtcactccagaaataccagccggcctgccttcacctcgaagcgaataa

SEQ ID NO: 76 - protein, 266 aa, Artificial Sequence
  s4-1BBL construct
MPMGSLQPLATLYLLGMLVASCLGGSGSNWSHPQFEKGGSGGHHHHHHGGSGGGVRLWATRQAMLGQVHEVPEGWLIFVAEQEELYVRVQNGFRKVQLEARTPLPRGTDNEGSGMFAQLVAQNVLLIDGPLSWYSDPGLAGVSLTGGLSYKEDTKELVVAKAGVYYVFFQLELRRVVAGEGSGSVSLALHLQPLRSAAGAAALALTVDLPPASSEARNSAFGFQGRLLHLSAGQRLGVHLHTEARARHAWQLTQGATVLGLFRVTP

SEQ ID NO: 77 - DNA, 801 bp, Artificial Sequence
  s4-1BBL construct
atgcccatggggtctctgcaaccgctggccaccttgtacctgctggggatgctggtcgcttcctgcctcggaggctctggctccaactggagccacccccagttcgagaagggaggttctgggggccatcaccatcaccatcacggcggttcagggggaggcgttcgactttgggctacaagacaggcaatgctgggccaggtccatgaggttcctgaggggtggctcattttcgtggccgagcaggaggagctgtatgttcgcgtgcaaaacggctttaggaaggtccagctggaagcgcggacacctttgcccaggggaaccgataacgagggatccggcatgtttgcgcagctggtggcccaaaatgttctgctgatcgatgggcccctgagctggtacagtgacccaggcctggcaggcgtgtccctgacggggggcctgagctacaaagaggacacgaaggagctggtggtggccaaggctggagtctactatgtcttctttcaactagagctgcggcgcgtggtggccggcgagggctcaggctccgtttcacttgcgctgcacctgcagccactgcgctctgctgctggggccgccgccctggctttgaccgtggacctgccacccgcctcctccgaggctcggaactcggccttcggtttccagggccgcttgctgcacctgagtgccggccagcgcctgggcgtccatcttcacactgaggccagggcacgccatgcctggcagcttacccagggcgccacagtcttgggactcttccgggtgaccccctaa

SEQ ID NO: 78 - protein, 653 aa, Artificial Sequence
  s4-1BBL construct
MPMGSLQPLATLYLLGMLVASCLGGSGSNWSHPQFEKGGSGGHHHHHHGGSGGGVRLWATRQAMLGQVHEVPEGWLIFVAEQEELYVRVQNGFRKVQLEARTPLPRGTDNEGSLDLRQGMFAQLVAQNVLLIDGPLSWYSDPGLAGVSLTGGLSYKEDTKELVVAKAGVYYVFFQLELRRVVAGEGSGSVSLALHLQPLRSAAGAAALALTVDLPPASSEARNSAFGFQGRLLHLSAGQRLGVHLHTEARARHAWQLTQGATVLGLFRVTPEIPAGLPSPRSEGGGGSGGGGSGGGGSLDLRQGMFAQLVAQNVLLIDGPLSWYSDPGLAGVSLTGGLSYKEDTKELVVAKAGVYYVFFQLELRRVVAGEGSGSVSLALHLQPLRSAAGAAALALTVDLPPASSEARNSAFGFQGRLLHLSAGQRLGVHLHTEARARHAWQLTQGATVLGLFRVTPEIPAGLPSPRSEGGGGSGGGGSGGGGSLDLRQGMFAQLVAQNVLLIDGPLSWYSDPGLAGVSLTGGLSYKEDTKELVVAKAGVYYVFFQLELRRVVAGEGSGSVSLALHLQPLRSAAGAAALALTVDLPPASSEARNSAFGFQGRLLHLSAGQRLGVHLHTEARARHAWQLTQGATVLGLFRVTPEIPAGLPSPRSE

SEQ ID NO: 79 - DNA, 1962 bp, Artificial Sequence; identical to SEQ ID NO: 71
  s4-1BBL construct

SEQ ID NO: 80 - DNA, 10 bp, Artificial Sequence
  Kozak sequence
  misc_feature (7)..(10): n is a, c, g, or t
gccaccnnnn

SEQ ID NO: 81 - DNA, 54 bp, Artificial Sequence
  Hammerhead ribozyme
ccaactttgtttggtctgatgagtccgtgaggacgaaacccggagtcccgggtc

SEQ ID NO: 82 - DNA, 20400 bp, Artificial Sequence
  Vector with soluble s4-1BBL ectodomain construct
accaaacaaagttgggtaaggatagttcaatcaatgatcatcttctagtgcacttaggattcaagatcctattatcagggacaagagcaggattagggatatctcgaggcgcgtgccaccatgcccatggggtctctgcaaccgctggccaccttgtacctgctggggatgctggtcgcttcctgcctcggagcctgtggctgtgcggctgccccagacatcaaggacctgctgagcagactggaggagctggaggggctggtatcctccctccgggagcagggatccttggacctgcggcagggcatgtttgcgcagctggtggcccaaaatgttctgctgatcgatgggcccctgagctggtacagtgacccaggcctggcaggcgtgtccctgacggggggcctgagctacaaagaggacacgaaggagctggtggtggccaaggctggagtctactatgtcttctttcaactagagctgcggcgcgtggtggccggcgagggctcaggctccgtttcacttgcgctgcacctgcagccactgcgctctgctgctggggccgccgccctggctttgaccgtggacctgccacccgcctcctccgaggctcggaactcggccttcggtttccagggccgcttgctgcacctgagtgccggccagcgcctgggcgtccatcttcacactgaggccagggcacgccatgcctggcagcttacccagggcgccacagtcttgggactcttccgggtgacccccgaaatcccagccggactcccttcaccgaggtcggaataaacgcgccatccatcattgttataaaaaacttaggattcaagatcctattatcagggacaagagcaggattagggatatccgagatggccacacttttaaggagcttagcattgttcaaaagaaacaaggacaaaccacccattacatcaggatccggtggagccatcagaggaatcaaacacattattatagtaccaatccctggagattcctcaattaccactcgatccagacttctggaccggttggtgaggttaattggaaacccggatgtgagcgggcccaaactaacaggggcactaataggtatattatccttatttgtggagtctccaggtcaattgattcagaggatcaccgatgaccctgacgttagcataaggctgttagaggttgtccagagtgaccagtcacaatctggccttaccttcgcatcaagaggtaccaacatggaggatgaggcggaccaatacttttcacatgatgatccaattagtagtgatcaatccaggttcggatggttcgggaacaaggaaatctcagatattgaagtgcaagaccctgagggattcaacatgattctgggtaccatcctagcccaaatttgggtcttgctcgcaaaggcggttacggccccagacacggcagctgattcggagctaagaaggtggataaagtacacccaacaaagaagggtagttggtgaatttagattggagagaaaatggttggatgtggtgaggaacaggattgccgaggacctctccttacgccgattcatggtcgctctaatcctggatatcaagagaacacccggaaacaaacccaggattgctgaaatgatatgtgacattgatacatatatcgtagaggcaggattagccagttttatcctgactattaagtttgggatagaaactatgtatcctgctcttggactgcatgaatttgctggtgagttatccacacttgagtccttgatgaacctttaccagcaaatgggggaaactgcaccctacatggtaatcctggagaactcaattcagaacaagttcagtgcaggatcataccctctgctctggagctatgccatgggagtaggagtggaacttgaaaactccatgggaggtttgaactttggccgatcttactttgatccagcatattttagattagggcaagagatggtaaggaggtcagctggaaaggtcagttccacattggcatctgaactcggtatcactgccgaggatgcaaggcttgtttcagagattgcaatgcatactactgaggacaagatcagtagagcggttggacccagacaagcccaagtatcatttctacacggtgatcaaagtgagaatgagctaccgagattggggggcaaggaagataggagggtcaaacagagtcgaggagaagccagggagagctacagagaaaccgggcccagcagagcaagtgatgcgagagctgcccatcttccaaccggcacacccctagacattgacactgcaacggagtccagccaagatccgcaggacagtcgaaggtcagctgacgccctgcttaggctgcaagccatggcaggaatctcggaagaacaaggctcagacacggacacccctatagtgtacaatgacagaaatcttctagactaggtgcgagaggccgagggccagaacaacatccgcctaccatccatcattgttataaaaaacttaggaaccaggtccacacagccgccagcccatcaaccatccactcccacgattggagccaatggcagaagagcaggcacgccatgtcaaaaacggactggaatgcatccgggctctcaaggccgagcccatcggctcactggccatcgaggaagctatggcagcatggtcagaaatatcagacaacccaggacaggagcgagccacctgcagggaagagaaggcaggcagttcgggtctcagcaaaccatgcctctcagcaattggatcaactgaaggcggtgcacctcgcatccgcggtcagggacctggagagagcgatgacgacgctgaaactttgggaatccccccaagaaatctccaggcatcaagcactgggttacagtgttattacgtttatgatcacagcggtgaagcggttaagggaatccaagatgctgactctatcatggttcaatcaggccttgatggtgatagcaccctctcaggaggagacaatgaatctgaaaacagcgatgtggatattggcgaacctgataccgagggatatgctatcactgaccggggatctgctcccatctctatggggttcagggcttctgatgttgaaactgcagaaggaggggagatccacgagctcctgagactccaatccagaggcaacaactttccgaagcttgggaaaactctcaatgttcctccgcccccggaccccggtagggccagcacttccgggacacccattaaaaagggcacagacgcgagattagcctcatttggaacggagatcgcgtctttattgacaggtggtgcaacccaatgtgctcgaaagtcaccctcggaaccatcagggccaggtgcacctgcggggaatgtccccgagtgtgtgagcaatgccgcactgatacaggagtggacacccgaatctggtaccacaatctccccgagatcccagaataatgaagaagggggagactattatgatgatgagctgttctctgatgtccaagatattaaaacagccttggccaaaatacacgaggataatcagaagataatctccaagctagaatcactgctgttattgaagggagaagttgagtcaattaagaagcagatcaacaggcaaaatatcagcatatccaccctggaaggacacctctcaagcatcatgatcgccattcctggacttgggaaggatcccaacgaccccactgcagatgtcgaaatcaatcccgacttgaaacccatcataggcagagattcaggccgagcactggccgaagttctcaagaaacccgttgccagccgacaactccaaggaatgacaaatggacggaccagttccagaggacagctgctgaaggaatttcagctaaagccgatcgggaaaaagatgagctcagccgtcgggtttgttcctgacaccggccctgcatcacgcagtgtaatccgctccattataaaatccagccggctagaggaggatcggaagcgttacctgatgactctccttgatgatatcaaaggagccaatgatcttgccaagttccaccagatgctgatgaagataataatgaagtagctacagctcaacttacctgccaaccccatgccagtcgacccaactagtacaacctaaatccattataaaaaacttaggagcaaagtgattgcctcccaaggtccacaatgacagagacctacgacttcgacaagtcggcatgggacatcaaagggtcgatcgctccgatacaacccaccacctacagtgatggcaggctggtgccccaggtcagagtcatagatcctggtctaggcgacaggaaggatgaatgctttatgtacatgtttctgctgggggttgttgaggacagcgattccctagggcctccaatcgggcgagcatttgggttcctgcccttaggtgttggcagatccacagcaaagcccgaaaaactcctcaaagaggccactgagcttgacatagttgttagacgtacagcagggctcaatgaaaaactggtgttctacaacaacaccccactaactctcctcacaccttggagaaaggtcctaacaacagggagtgtcttcaacgcaaaccaagtgtgcaatgcggttaatctgataccgctcgataccccgcagaggttccgtgttgtttatatgagcatcacccgtctttcggataacgggtattacaccgttcctagaagaatgctggaattcagatcggtcaatgcagtggccttcaacctgctggtgacccttaggattgacaaggcgataggccctgggaagatcatcgacaatacagagcaacttcctgaggcaacatttatggtccacatcgggaacttcaggagaaagaagagtgaagtctactctgccgattattgcaaaatgaaaatcgaaaagatgggcctggtttttgcacttggtgggatagggggcaccagtcttcacattagaagcacaggcaaaatgagcaagactctccatgcacaactcgggttcaagaagaccttatgttacccgctgatggatatcaatgaagaccttaatcgattactctggaggagcagatgcaagatagtaagaatccaggcagttttgcagccatcagttcctcaagaattccgcatttacgacgacgtgatcataaatgatgaccaaggactattcaaagttctgtagaccgtagtgcccagcaatgcccgaaaacgacccccctcacaatgacagccagaaggcccggacaaaaaagccccctccgaaagactccacggaccaagcgagaggccagccagcagccgacggcaagcgcgaacaccaggcggccccagcacagaacagccctgacacaaggccaccaccagccaccccaatctgcatcctcctcgtgggacccccgaggaccaacccccaaggctgcccccgatccaaaccaccaaccgcatccccaccacccccgggaaagaaacccccagcaattggaaggcccctccccctcttcctcaacacaagaactccacaaccgaaccgcacaagcgaccgaggtgacccaaccgcaggcatccgactccctagacagatcctctctccccggcaaactaaacaaaacttagggccaaggaacatacacacccaacagaacccagaccccggcccacggcgccgcgcccccaacccccgacaaccagagggagcccccaaccaatcccgccggctcccccggtgcccacaggcagggacaccaacccccgaacagacccagcacccaaccatcgacaatccaagacgggggggcccccccaaaaaaaggcccccaggggccgacagccagcaccgcgaggaagcccacccaccccacacacgaccacggcaaccaaaccagaacccagaccaccctgggccaccagctcccagactcggccatcaccccgcagaaaggaaaggccacaacccgcgcaccccagccccgatccggcggggagccacccaacccgaaccagcacccaagagcgatccccgaaggacccccgaaccgcaaaggacatcagtatcccacagcctctccaagtcccccggtctcctcctcttctcgaagggaccaaaagatcaatccaccacacccgacgacactcaactccccacccctaaaggagacaccgggaatcccagaatcaagactcatccaatgtccatcatgggtctcaaggtgaacgtctctgccatattcatggcagtactgttaactctccaaacacccaccggtcaaatccattggggcaatctctctaagataggggtggtaggaataggaagtgcaagctacaaagttatgactcgttccagccatcaatcattagtcataaaattaatgcccaatataactctcctcaataactgcacgagggtagagattgcagaatacaggagactactgagaacagttttggaaccaattagagatgcacttaatgcaatgacccagaatataagaccggttcagagtgtagcttcaagtaggagacacaagagatttgcgggagtagtcctggcaggtgcggccctaggcgttgccacagctgctcagataacagccggcattgcacttcaccagtccatgctgaactctcaagccatcgacaatctgagagcgagcctggaaactactaatcaggcaattgagacaatcagacaagcagggcaggagatgatattggctgttcagggtgtccaagactacatcaataatgagctgataccgtctatgaaccaactatcttgtgatttaatcggccagaagctcgggctcaaattgctcagatactatacagaaatcctgtcattatttggccccagtttacgggaccccatatctgcggagatatctatccaggctttgagctatgcgcttggaggagacatcaataaggtgttagaaaagctcggatacagtggaggtgatttactgggcatcttagagagcggaggcatcaaggcccggataactcacgtcgacacagagtcctacttcattgtcctcagtatagcctatccgacgctgtccgagattaagggggtgattgtccaccggctagagggggtctcgtacaacataggctctcaagagtggtataccactgtgcccaagtatgttgcaacccaagggtaccttatctcgaattttgatgagtcatcgtgtactttcatgccagaggggactgtgtgcagccaaaatgccttgtacccgatgagtcctctgctccaagaatgcctccgggggtacaccaagtcctgtgctcgtacactcgtatccgggtcttttgggaaccggttcattttatcacaagggaacctaatagccaattgtgcatcaatcctttgcaagtgttacacaacaggaacgatcattaatcaagaccctgacaagatcctaacatacattgctgccgatcactgcccggtagtcgaggtgaacggcgtgaccatccaagtcgggagcaggaggtatccagacgctgtgtacttgcacagaattgacctcggtcctcccatatcattggagaggttggacgtagggacaaatctggggaatgcaattgctaagttggaggatgccaaggaattgttggagtcatcggaccagatattgaggagtatgaaaggtttatcgagcactagcatagtctacatcctgattgcagtgtgtcttggagggttgatagggatccccgctttaatatgttgctgcagggggcgttgtaacaaaaagggagaacaagttggtatgtcaagaccaggcctaaagcctgatcttacgggaacatcaaaatcctatgtaaggtcgctctgatcctctacaactcttgaaacacaaatgtcccacaagtctcctcttcgtcatcaagcaaccaccgcacccagcatcaagcccacctgaaattatctccggcttccctctggccgaacaatatcggtagttaatcaaaacttagggtgcaagatcatccacaatgtcaccacaacgagaccggataaatgccttctacaaagataacccccatcccaagggaagtaggatagtcattaacagagaacatcttatgattgatagaccttatgttttgctggctgttctgtttgtcatgtttctgagcttgatcgggttgctagccattgcaggcattagacttcatcgggcagccatctacaccgcagagatccataaaagcctcagcaccaatctagatgtaactaactcaatcgagcatcaggtcaaggacgtgctgacaccactcttcaaaatcatcggtgatgaagtgggcctgaggacacctcagagattcactgacctagtgaaattaatctctgacaagatcaagttccttaatccggatagggagtacgacttcagagatctcacttggtgtatcaacccgccagagagaatcaaattggattatgatcaatactgtgcagatgtggctgctgaagagctcatgaatgcattggtgaactcaactctactggagaccagaacaaccaatcagttcctagctgtctcaaagggaaactgctcagggcccactacaatcagaggtcaattctcaaacatgtcgctgtccctgttagacttgtatttaggtcgaggttacaatgtgtcatctatagtcactatgacatcccagggaatgtatgggggaacttacctagtggaaaagcctaatctgagcagcaaaaggtcagagttgtcacaactgagcatgtaccgagtgtttgaagtaggtgttatcagaaatccgggtttgggggctccggtgttccatatgacaaactatcttgagcaaccagtcagtaatgatctcagcaactgtatggtggctttgggggagctcaaactcgcagccctttgtcacggggaagattctatcacaattccctatcagggatcagggaaaggtgtcagcttccagctcgtcaagctaggtgtctggaaatccccaaccgacatgcaatcctgggtccccttatcaacggatgatccagtgatagacaggctttacctctcatctcacagaggtgttatcgctgacaatcaagcaaaatgggctgtcccgacaacacgaacagatgacaagttgcgaatggagacatgcttccaacaggcgtgtaagggtaaaatccaagcactctgcgagaatcccgagtgggcaccattgaaggataacaggattccttcatacggggtcttgtctgttgatctgagtctgacagttgagcttaaaatcaaaattgcttcgggattcgggccattgatcacacacggttcagggatggacctatacaaatccaaccacaacaatgtgtattggctgactatcccgccaatgaagaacctagccttaggtgtaatcaacacattggagtggataccgagattcaaggttagtccctacctcttcactgtcccaattaaggaagcaggcgaagactgccatgccccaacatacctacctgcggaggtggatggtgatgtcaaactcagttccaatctggtgattctacctggtcaagatctccaatatgttttggcaacctacgatacttccagggttgaacatgctgtggtttattacgtttacagcccaagccgctcattttcttacttttatccttttaggttgcctataaagggggtccccatcgaattacaagtggaatgcttcacatgggaccaaaaactctggtgccgtcacttctgtgtgcttgcggactcagaatctggtggacatatcactcactctgggatggtgggcatgggagtcagctgcacagtcacccgggaagatggaaccaatcgcagatagggctgctagtgaaccaatcacatgatgtcacccagacatcaggcatacccactagtgtgaaatagacatcagaattaagaaaaacgtagggtccaagtggttccccgttatggactcgctatctgtcaaccagatcttataccctgaagttcacctagatagcccgatagttaccaataagatagtagccatcctggagtatgctcgagtccctcacgcttacagcctggaggaccctacactgtgtcagaacatcaagcaccgcctaaaaaacggattttccaaccaaatgattataaacaatgtggaagttgggaatgtcatcaagtccaagcttaggagttatccggcccactctcatattccatatccaaattgtaatcaggatttatttaacatagaagacaaagagtcaacgaggaagatccgtgaactcctcaaaaaggggaattcgctgtactccaaagtcagtgataaggttttccaatgcttaagggacactaactcacggcttggcctaggctccgaattgagggaggacatcaaggagaaagttattaacttgggagtttacatgcacagctcccagtggtttgagccctttctgttttggtttacagtcaagactgagatgaggtcagtgattaaatcacaaacccatacttgccataggaggagacacacacctgtattcttcactggtagttcagttgagttgctaatctctcgtgaccttgttgctataatcagtaaagagtctcaacatgtatattacctgacatttgaactggttttgatgtattgtgatgtcatagaggggaggttaatgacagagaccgctatgactattgatgctaggtatacagagcttctaggaagagtcagatacatgtggaaactgatagatggtttcttccctgcactcgggaatccaacttatcaaattgtagccatgctggagcctctttcacttgcttacctgcagctgagggatataacagtagaactcagaggtgctttccttaaccactgctttactgaaatacatgatgttcttgaccaaaacgggttttctgatgaaggtacttatcatgagttaactgaagctctagattacattttcataactgatgacatacatctgacaggggagattttctcatttttcagaagtttcggccaccccagacttgaagcagtaacggctgctgaaaatgttaggaaatacatgaatcagcctaaagtcattgtgtatgagactctgatgaaaggtcatgccatattttgtggaatcataatcaacggctatcgtgacaggcacggaggcagttggccaccgctgaccctccccctgcatgctgcagacacaatccggaatgctcaagcttcaggtgaagggttaacacatgagcagtgcgttgataactggaaatcttttgctggagtgaaatttggctgctttatgcctcttagcctggatagtgatctgacaatgtacctaaaggacaaggcacttgctgctctccaaagggaatgggattcagtttacccgaaagagttcctgcgttacgaccctcccaagggaaccgggtcacggaggcttgtagatgttttccttaatgattcgagctttgacccatatgatgtgataatgtatgttgtaagtggagcttacctccatgaccctgagttcaacctgtcttacagcctgaaagaaaaggagatcaaggaaacaggtagactttttgctaaaatgacttacaaaatgagggcatgccaagtgattgctgaaaatctaatctcaaacgggattggcaaatattttaaggacaatgggatggccaaggatgagcacgatttgactaaggcactccacactctagctgtctcaggagtccccaaagatctcaaagaaagtcacaggggggggccagtcttaaaaacctactcccgaagcccagtccacacaagtaccaggaacgtgagagcagcaaaagggtttatagggttccctcaagtaattcggcaggaccaagacactgatcatccggagaatatggaagcttacgagacagtcagtgcatttatcacgactgatctcaagaagtactgccttaattggagatatgagaccatcagcttgtttgcacagaggctaaatgagatttacggattgccctcatttttccagtggctgcataagaggcttgagacctctgtcctgtatgtaagtgaccctcattgcccccccgaccttgacgcccatatcccgttatataaagtccccaatgatcaaatcttcattaagtaccctatgggaggtatagaagggtattgtcagaagctgtggaccatcagcaccattccctatctatacctggctgcttatgagagcggagtaaggattgcttcgttagtgcaaggggacaatcagaccatagccgtaacaaaaagggtacccagcacatggccctacaaccttaagaaacgggaagctgctagagtaactagagattactttgtaattcttaggcaaaggctacatgatattggccatcacctcaaggcaaatgagacaattgtttcatcacatttttttgtctattcaaaaggaatatattatgatgggctacttgtgtcccaatcactcaagagcatcgcaagatgtgtattctggtcagagactatagttgatgaaacaagggcagcatgcagtaatattgctacaacaatggctaaaagcatcgagagaggttatgaccgttaccttgcatattccctgaacgtcctaaaagtgatacagcaaattctgatctctcttggcttcacaatcaattcaaccatgacccgggatgtagtcatacccctcctcacaaacaacgacctcttaataaggatggcactgttgcccgctcctattggggggatgaattatctgaatatgagcaggctgtttgtcagaaacatcggtgatccagtaacatcatcaattgctgatctcaagagaatgattctcgcctcactaatgcctgaagagaccctccatcaagtaatgacacaacaaccgggggactcttcattcctagactgggctagcgacccttactcagcaaatcttgtatgtgtccagagcatcactagactcctcaagaacataactgcaaggtttgtcctgatccatagtccaaacccaatgttaaaaggattattccatgatgacagtaaagaagaggacgagggactggcggcattcctcatggacaggcatattatagtacctagggcagctcatgaaatcctggatcatagtgtcacaggggcaagagagtctattgcaggcatgctggataccacaaaaggcttgattcgagccagcatgaggaagggggggttaacctctcgagtgataaccagattgtccaattatgactatgaacaattcagagcagggatggtgctattgacaggaagaaagagaaatgtcctcattgacaaagagtcatgttcagtgcagctggcgagagctctaagaagccatatgtgggcgaggctagctcgaggacggcctatttacggccttgaggtccctgatgtactagaatctatgcgaggccaccttattcggcgtcatgagacatgtgtcatctgcgagtgtggatcagtcaactacggatggttttttgtcccctcgggttgccaactggatgatattgacaaggaaacatcatccttgagagtcccatatattggttctaccactgatgagagaacagacatgaagcttgccttcgtaagagccccaagtcgatccttgcgatctgctgttagaatagcaacagtgtactcatgggcttacggtgatgatgatagctcttggaacgaagcctggttgttggctaggcaaagggccaatgtgagcctggaggagctaagggtgatcactcccatctcaacttcgactaatttagcgcataggttgagggatcgtagcactcaagtgaaatactcaggtacatcccttgtccgagtggcgaggtataccacaatctccaacgacaatctctcatttgtcatatcagataagaaggttgatactaactttatataccaacaaggaatgcttctagggttgggtgttttagaaacattgtttcgactcgagaaagataccggatcatctaacacggtattacatcttcacgtcgaaacagattgttgcgtgatcccgatgatagatcatcccaggatacccagctcccgcaagctagagctgagggcagagctatgtaccaacccattgatatatgataatgcacctttaattgacagagatgcaacaaggctatacacccagagccataggaggcaccttgtggaatttgttacatggtccacaccccaactatatcacattttagctaagtccacagcactatctatgattgacctggtaacaaaatttgagaaggaccatatgaatgaaatttcagctctcataggggatgacgatatcaatagtttcataactgagtttctgctcatagagccaagattattcactatctacttgggccagtgtgcggccatcaattgggcatttgatgtacattatcatagaccatcagggaaatatcagatgggtgagctgttgtcatcgttcctttctagaatgagcaaaggagtgtttaaggtgcttgtcaatgctctaagccacccaaagatctacaagaaattctggcattgtggtattatagagcctatccatggtccttcacttgatgctcaaaacttgcacacaactgtgtgcaacatggtttacacatgctatatgacctacctcgacctgttgttgaatgaagagttagaagagttcacatttctcttgtgtgaaagcgacgaggatgtagtaccggacagattcgacaacatccaggcaaaacacttatgtgttctggcagatttgtactgtcaaccagggacctgcccaccaattcgaggtctaagaccggtagagaaatgtgcagttctaaccgaccatatcaaggcagaggctatgttatctccagcaggatcttcgtggaacataaatccaattattgtagaccattactcatgctctctgacttatctccggcgaggatcgatcaaacagataagattgagagttgatccaggattcattttcgacgccctcgctgaggtaaatgtcagtcagccaaagatcggcagcaacaacatctcaaatatgagcatcaaggctttcagacccccacacgatgatgttgcaaaattgctcaaagatatcaacacaagcaagcacaatcttcccatttcagggggcaatctcgccaattatgaaatccatgctttccgcagaatcgggttgaactcatctgcttgctacaaagctgttgagatatcaacattaattaggagatgccttgagccaggggaggacggcttgttcttgggtgagggatcgggttctatgttgatcacttataaagagatacttaaactaaacaagtgcttctataatagtggggtttccgccaattctagatctggtcaaagggaattagcaccctatccctccgaagttggccttgtcgaacacagaatgggagtaggtaatattgtcaaagtgctctttaacgggaggcccgaagtcacgtgggtaggcagtgtagattgcttcaatttcatagttagtaatatccctacctctagtgtggggtttatccattcagatatagagaccttgcctgacaaagatactatagagaagctagaggaattggcagccatcttatcgatggctctgctcctgggcaaaataggatcaatactggtgattaagcttatgcctttcagcggggattttgttcagggatttataagttatgtagggtctcattatagagaagtgaaccttgtataccctagatacagcaacttcatctctactgaatcttatttggttatgacagatctcaaggctaaccggctaatgaatcctgaaaagattaagcagcagataattgaatcatctgtgaggacttcacctggacttataggtcacatcctatccattaagcaactaagctgcatacaagcaattgtgggagacgcagttagtagaggtgatatcaatcctactctgaaaaaacttacacctatagagcaggtgctgatcaattgcgggttggcaattaacggacctaagctgtgcaaagaattgatccaccatgatgttgcctcagggcaagatggattgcttaattctatactcatcctctacagggagttggcaagattcaaagacaaccaaagaagtcaacaagggatgttccacgcttaccccgtattggtaagtagcaggcaacgagaacttatatctaggatcacccgcaaattctgggggcacattcttctttactccgggaacaaaaagttgataaataagtttatccagaatctcaagtccggctatctgatactagacttacaccagaatatcttcgttaagaatctatccaagtcagagaaacagattattatgacggggggtttgaaacgtgagtgggtttttaaggtaacagtcaaggagaccaaagaatggtataagttagtcggatacagtgccctgattaaggactaattggttgaactccggaaccctaatcctgccctaggtggttaggcattatttgcaatatattaaagaaaactttgaaaatacgaagtttctattcccagctttgtctggtggccggcatggtcccagcctcctcgctggcgccggctgggcaacattccgaggggaccgtcccctcggtaatggcgaatgggacgcggccggtcgatcgacgatccggctgctaacaaagcccgaaaggaagctgagttggctgctgccaccgctgagcaataactagcataaccccttggggcctctaaacgggtcttgaggggttttttgctgaaaggaggaactatatccggatcgagatcaattctgtgagcgtatggcaaacgaaggaaaaatagttatagtagccgcactcgatgggacatttcaacgtaaaccgtttaataatattttgaatcttattccattatctgaaatggtggtaaaactaactgctgtgtgtatgaaatgctttaaggaggcttccttttctaaacgattgggtgaggaaaccgagatagaaataataggaggtaatgatatgtatcaatcggtgtgtagaaagtgttacatcgactcataatattatattttttatctaaaaaactaaaaataaacattgattaaattttaatataatacttaaaaatggatgttgtgtcgttagataaaccgtttatgtattttgaggaaattgataatgagttagattacgaaccagaaagtgcaaatgaggtcgcaaaaaaactgccgtatcaaggacagttaaaactattactaggagaattattttttcttagtaagttacagcgacacggtatattagatggtgccaccgtagtgtatataggatctgctcccggtacacatatacgttatttgagagatcatttctataatttaggagtgatcccgaaaggaagctgagttggctgctgccaccgctgagcaataactagcataaccccttggggcctctaaacgggtcttgaggggttttttgctgaaaggaggaacgcgcctgatgcggtattttctccttacgcatctgtgcggtatttcacaccgcatatatggtgcactctcagtacaatctgctctgatgccgcatagttaagccagccccgacacccgccaacacccgctgacgcgccctgacgggcttgtctgctcccggcatccgcttacagacaagctgtgaccgtctccgggagctgcatgtgtcagaggttttcaccgtcatcaccgaaacgcgcgagacgaaagggcctcgtgatacgcctatttttataggttaatgtcatgataataatggtttcttagacgtcaggtggcacttttcggggaaatgtgcgcggaacccctatttgtttatttttctaaatacattcaaatatgtatccgctcatgagacaataaccctgataaatgcttcaataatattgaaaaaggaagagtatgagtattcaacatttccgtgtcgcccttattcccttttttgcggcattttgccttcctgtttttgctcacccagaaacgctggtgaaagtaaaagatgctgaagatcagttgggtgcacgagtgggttacatcgaactggatctcaacagcggtaagatccttgagagttttcgccccgaagaacgttttccaatgatgagcacttttaaagttctgctatgtggcgcggtattatcccgtattgacgccgggcaagagcaactcggtcgccgcatacactattctcagaatgacttggttgagtactcaccagtcacagaaaagcatcttacggatggcatgacagtaagagaattatgcagtgctgccataaccatgagtgataacactgcggccaacttacttctgacaacgatcggaggaccgaaggagctaaccgcttttttgcacaacatgggggatcatgtaactcgccttgatcgttgggaaccggagctgaatgaagccataccaaacgacgagcgtgacaccacgatgcctgtagcaatggcaacaacgttgcgcaaactattaactggcgaactacttactctagcttcccggcaacaattaatagactggatggaggcggataaagttgcaggaccacttctgcgctcggcccttccggctggctggtttattgctgataaatctggagccggtgagcgtgggtctcgcggtatcattgcagcactggggccagatggtaagccctcccgtatcgtagttatctacacgacggggagtcaggcaactatggatgaacgaaatagacagatcgctgagataggtgcctcactgattaagcattggtaactgtcagaccaagtttactcatatatactttagattgatttaaaacttcatttttaatttaaaaggatctaggtgaagatcctttttgataatctcatgaccaaaatcccttaacgtgagttttcgttccactgagcgtcagaccccgtagaaaagatcaaaggatcttcttgagatcctttttttctgcgcgtaatctgctgcttgcaaacaaaaaaaccaccgctaccagcggtggtttgtttgccggatcaagagctaccaactctttttccgaaggtaactggcttcagcagagcgcagataccaaatactgtccttctagtgtagccgtagttaggccaccacttcaagaactctgtagcaccgcctacatacctcgctctgctaatcctgttaccagtggctgctgccagtggcgataagtcgtgtcttaccgggttggactcaagacgatagttaccggataaggcgcagcggtcgggctgaacggggggttcgtgcacacagcccagcttggagcgaacgacctacaccgaactgagatacctacagcgtgagcattgagaaagcgccacgcttcccgaagggagaaaggcggacaggtatccggtaagcggcagggtcggaacaggagagcgcacgagggagcttccagggggaaacgcctggtatctttatagtcctgtcgggtttcgccacctctgacttgagcgtcgatttttgtgatgctcgtcaggggggcggagcctatggaaaaacgccagcaacgcggcctttttacggttcctggccttttgctggccttttgctcacatgttctttcctgcgttatcccctgattctgtggataaccgtattaccgcctttgagtgagctgataccgctcgccgcagccgaacgaccgagcgcagcgagtcagtgagcgaggaagcggaagagcgcccaatacgcaaaccgcctctccccgcgcgttggccgattcattaatgcagctggcacgacaggtttcccgactggaaagcgggcagtgagcgcaacgcaattaatgtgagttagctcactcattaggcaccccaggctttacactttatgcttccggctcgtatgttgtgtggaattgtgagcggataacaatttcacacaggaaacagctatgaccatgattacgccaagcttacgcgtcctggcattatgcccagtacatgaccttatgggactttcctacttggcagtacatctacgtattagtcatcgctattaccatggtgatgcggttttggcagtacatcaatgggcgtggatagcggtttgactcacggggatttccaagtctccaccccattgacgtcaatgggagtttgttttggcaccaaaatcaacgggactttccaaaatgtcgtaacaactccgccccattgacgcaaatgggcggtaggcgtgtacggtgggaggtctatataagcagagctcgtttagtgaaccgtgg

SEQ ID NO: 83 - DNA, 10945 bp, Artificial Sequence
  Vector with soluble s4-1BBL ectodomain construct
gttgacattgattattgactagttattaatagtaatcaattacggggtcattagttcatagcccatatatggagttccgcgttacataacttacggtaaatggcccgcctggctgaccgcccaacgacccccgcccattgacgtcaataatgacgtatgttcccatagtaacgccaatagggactttccattgacgtcaatgggtggagtatttacggtaaactgcccacttggcagtacatcaagtgtatcatatgccaagtccgccccctattgacgtcaatgacggtaaatggcccgcctggcattatgcccagtacatgaccttacgggactttcctacttggcagtacatctacgtattagtcatcgctattaccatggtgatgcggttttggcagtacaccaatgggcgtggatagcggtttgactcacggggatttccaagtctccaccccattgacgtcaatgggagtttgttttggcaccaaaatcaacgggactttccaaaatgtcgtaataaccccgccccgttgacgcaaatgggcggtaggcgtgtacggtgggaggtctatataagcagagctcgtttagtgaaccgtcagatctctagaagctgggtaccagctgctagcaagcttgccaccatgcccatggggtctctgcaaccgctggccaccttgtacctgctggggatgctggtcgcttcctgcctcggaggctctggctccaactggagccacccccagttcgagaagggaggttctgggggccatcaccatcaccatcacggcggttcagggggaacgcgtgcctgtggctgtgcggctgccccagacatcaaggacctgctgagcagactggaggagctggaggggctggtatcctccctccgggagcagggatccttggacctgcggcagggcatgtttgcgcagctggtggcccaaaatgttctgctgatcgatgggcccctgagctggtacagtgacccaggcctggcaggcgtgtccctgacggggggcctgagctacaaagaggacacgaaggagctggtggtggccaaggctggagtctactatgtcttctttcaactagagctgcggcgcgtggtggccggcgagggctcaggctccgtttcacttgcgctgcacctgcagccactgcgctctgctgctggggccgccgccctggctttgaccgtggacctgccacccgcctcctccgaggctcggaactcggccttcggtttccagggccgcttgctgcacctgagtgccggccagcgcctgggcgtccatcttcacactgaggccagggcacgccatgcctggcagcttacccagggcgccacagtcttgggactcttccgggtgacccccgaaatcccagccggactcccttcaccgaggtcggaataagcggccgcagatccagacatgataagatacattgatgagtttggacaaaccacaactagaatgcagtgaaaaaaatgctttatttgtgaaatttgtgatgctattgctttatttgtaaccattataagctgcaataaacaagttaacaacaacaattgcattcattttatgtttcaggttcagggggaggtgtgggaggttttttaaagcaagtaaaacctctacaaatgtggtatggctgattatgatccggctgcctcgcgcgtttcggtgatgacggtgaaaacctctgacacatgcagctcccggagacggtcacagcttgtctgtaagcggatgccgggagcagacaagcccgtcaggcgtcagcgggtgttggcgggtgtcggggcgcagccatgaggtcgactctagaggatcgatgccccgccccggacgaactaaacctgactacgacatctctgccccttcttcgcggggcagtgcatgtaatcccttcagttggttggtacaacttgccaactgggccctgttccacatgtgacacggggggggaccaaacacaaaggggttctctgactgtagttgacatccttataaatggatgtgcacatttgccaacactgagtggctttcatcctggagcagactttgcagtctgtggactgcaacacaacattgcctttatgtgtaactcttggctgaagctcttacaccaatgctgggggacatgtacctcccaggggcccaggaagactacgggaggctacaccaacgtcaatcagaggggcctgtgtagctaccgataagcggaccctcaagagggcattagcaatagtgtttataaggcccccttgttaaccctaaacgggtagcatatgcttcccgggtagtagtatatactatccagactaaccctaattcaatagcatatgttacccaacgggaagcatatgctatcgaattagggttagtaaaagggtcctaaggaacagcgatatctcccaccccatgagctgtcacggttttatttacatggggtcaggattccacgagggtagtgaaccattttagtcacaagggcagtggctgaagatcaaggagcgggcagtgaactctcctgaatcttcgcctgcttcttcattctccttcgtttagctaatagaataactgctgagttgtgaacagtaaggtgtatgtgaggtgctcgaaaacaaggtttcaggtgacgcccccagaataaaatttggacggggggttcagtggtggcattgtgctatgacaccaatataaccctcacaaaccccttgggcaataaatactagtgtaggaatgaaacattctgaatatctttaacaatagaaatccatggggtggggacaagccgtaaagactggatgtccatctcacacgaatttatggctatgggcaacacataatcctagtgcaatatgatactggggttattaagatgtgtcccaggcagggaccaagacaggtgaaccatgttgttacactctatttgtaacaaggggaaagagagtggacgccgacagcagcggactccactggttgtctctaacacccccgaaaattaaacggggctccacgccaatggggcccataaacaaagacaagtggccactcttttttttgaaattgtggagtgggggcacgcgtcagcccccacacgccgccctgcggttttggactgtaaaataagggtgtaataacttggctgattgtaaccccgctaaccactgcggtcaaaccacttgcccacaaaaccactaatggcaccccggggaatacctgcataagtaggtgggcgggccaagataggggcgcgattgctgcgatctggaggacaaattacacacacttgcgcctgagcgccaagcacagggttgttggtcctcatattcacgaggtcgctgagagcacggtgggctaatgttgccatgggtagcatatactacccaaatatctggatagcatatgctatcctaatctatatctgggtagcataggctatcctaatctatatctgggtagcatatgctatcctaatctatatctgggtagtatatgctatcctaatttatatctgggtagcataggctatcctaatctatatctgggtagcatatgctatcctaatctatatctgggtagtatatgctatcctaatctgtatccgggtagcatatgctatcctaatagagattagggtagtatatgctatcctaatttatatctgggtagcatatactacccaaatatctggatagcatatgctatcctaatctatatctgggtagcatatgctatcctaatctatatctgggtagcataggctatcctaatctatatctgggtagcatatgctatcctaatctatatctgggtagtatatgctatcctaatttatatctgggtagcataggctatcctaatctatatctgggtagcatatgctatcctaatctatatctgggtagtatatgctatcctaatctgtatccgggtagcatatgctatcctcatgcatatacagtcagcatatgatacccagtagtagagtgggagtgctatcctttgcatatgccgccacctcccaagggggcgtgaattttcgctgcttgtccttttcctgctggttgctcccattcttaggtgaatttaaggaggccaggctaaagccgtcgcatgtctgattgctcaccaggtaaatgtcgctaatgttttccaacgcgagaaggtgttgagcgcggagctgagtgacgtgacaacatgggtatgcccaattgccccatgttgggaggacgaaaatggtgacaagacagatggccagaaatacaccaacagcacgcatgatgtctactggggatttattctttagtgcgggggaatacacggcttttaatacgattgagggcgtctcctaacaagttacatcactcctgcccttcctcaccctcatctccatcacctccttcatctccgtcatctccgtcatcaccctccgcggcagccccttccaccataggtggaaaccagggaggcaaatctactccatcgtcaaagctgcacacagtcaccctgatattgcaggtaggagcgggctttgtcataacaaggtccttaatcgcatccttcaaaacctcagcaaatatatgagtttgtaaaaagaccatgaaataacagacaatggactcccttagcgggccaggttgtgggccgggtccaggggccattccaaaggggagacgactcaatggtgtaagacgacattgtggaatagcaagggcagttcctcgccttaggttgtaaagggaggtcttactacctccatatacgaacacaccggcgacccaagttccttcgtcggtagtcctttctacgtgactcctagccaggagagctcttaaaccttctgcaatgttctcaaatttcgggttggaacctccttgaccacgatgctttccaaaccaccctccttttttgcgcctgcctccatcaccctgaccccggggtccagtgcttgggccttctcctgggtcatctgcggggccctgctctatcgctcccgggggcacgtcaggctcaccatctgggccaccttcttggtggtattcaaaataatcggcttcccctacagggtggaaaaatggccttctacctggagggggcctgcgcggtggagacccggatgatgatgactgactactgggactcctgggcctcttttctccacgtccacgacctctccccctggctctttcacgacttccccccctggctctttcacgtcctctaccccggcggcctccactacctcctcgaccccggcctccactacctcctcgaccccggcctccactgcctcctcgaccccggcctccacctcctgctcctgcccctcctgctcctgcccctcctcctgctcctgcccctcctgcccctcctgctcctgcccctcctgcccctcctgctcctgcccctcctgcccctcctgctcctgcccctcctgcccctcctcctgctcctgcccctcctgcccctcctcctgctcctgcccctcctgcccctcctgctcctgcccctcctgcccctcctgctcctgcccctcctgcccctcctgctcctgcccctcctgctcctgcccctcctgctcctgcccctcctgctcctgcccctcctgcccctcctgcccctcctcctgctcctgcccctcctgctcctgcccctcctgcccctcctgcccctcctgctcctgcccctcctcctgctcctgcccctcctgcccctcctgcccctcctcctgctcctgcccctcctgcccctcctcctgctcctgcccctcctcctgctcctgcccctcctgcccctcctgcccctcctcctgctcctgcccctcctgcccctcctcctgctcctgcccctcctcctgctcctgcccctcctgcccctcctgcccctcctcctgctcctgcccctcctcctgctcctgcccctcctgcccctcctgcccctcctgcccctcctcctgctcctgcccctcctcctgctcctgcccctcctgctcctgcccctcccgctcctgctcctgctcctgttccaccgtgggtccctttgcagccaatgcaacttggacgtttttggggtctccggacaccatctctatgtcttggccctgatcctgagccgcccggggctcctggtcttccgcctcctcgtcctcgtcctcttccccgtcctcgtccatggttatcaccccctcttctttgaggtccactgccgccggagccttctggtccagatgtgtctcccttctctcctaggccatttccaggtcctgtacctggcccctcgtcagacatgattcacactaaaagagatcaatagacatctttattagacgacgctcagtgaatacagggagtgcagactcctgccccctccaacagcccccccaccctcatccccttcatggtcgctgtcagacagatccaggtctgaaaattccccatcctccgaaccatcctcgtcctcatcaccaattactcgcagcccggaaaactcccgctgaacatcctcaagatttgcgtcctgagcctcaagccaggcctcaaattcctcgtccccctttttgctggacggtagggatggggattctcgggacccctcctcttcctcttcaaggtcaccagacagagatgctactggggcaacggaagaaaagctgggtgcggcctgtgaggatcagcttatcgatgataagctgtcaaacatgagaattcttgaagacgaaagggcctcgtgatacgcctatttttataggttaatgtcatgataataatggtttcttagacgtcaggtggcacttttcggggaaatgtgcgcggaacccctatttgtttatttttctaaatacattcaaatatgtatccgctcatgagacaataaccctgataaatgcttcaataatattgaaaaaggaagagtatgagtattcaacatttccgtgtcgcccttattcccttttttgcggcattttgccttcctgtttttgctcacccagaaacgctggtgaaagtaaaagatgctgaagatcagttgggtgcacgagtgggttacatcgaactggatctcaacagcggtaagatccttgagagttttcgccccgaagaacgttttccaatgatgagcacttttaaagttctgctatgtggcgcggtattatcccgtgttgacgccgggcaagagcaactcggtcgccgcatacactattctcagaatgacttggttgagtactcaccagtcacagaaaagcatcttacggatggcatgacagtaagagaattatgcagtgctgccataaccatgagtgataacactgcggccaacttacttctgacaacgatcggaggaccgaaggagctaaccgcttttttgcacaacatgggggatcatgtaactcgccttgatcgttgggaaccggagctgaatgaagccataccaaacgacgagcgtgacaccacgatgcctgcagcaatggcaacaacgttgcgcaaactattaactggcgaactacttactctagcttcccggcaacaattaatagactggatggaggcggataaagttgcaggaccacttctgcgctcggcccttccggctggctggtttattgctgataaatctggagccggtgagcgtgggtctcgcggtatcattgcagcactggggccagatggtaagccctcccgtatcgtagttatctacacgacggggagtcaggcaactatggatgaacgaaatagacagatcgctgagataggtgcctcactgattaagcattggtaactgtcagaccaagtttactcatatatactttagattgatttaaaacttcatttttaatttaaaaggatctaggtgaagatcctttttgataatctcatgaccaaaatcccttaacgtgagttttcgttccactgagcgtcagaccccgtagaaaagatcaaaggatcttcttgagatcctttttttctgcgcgtaatctgctgcttgcaaacaaaaaaaccaccgctaccagcggtggtttgtttgccggatcaagagctaccaactctttttccgaaggtaactggcttcagcagagcgcagataccaaatactgtccttctagtgtagccgtagttaggccaccacttcaagaactctgtagcaccgcctacatacctcgctctgctaatcctgttaccagtggctgctgccagtggcgataagtcgtgtcttaccgggttggactcaagacgatagttaccggataaggcgcagcggtcgggctgaacggggggttcgtgcacacagcccagcttggagcgaacgacctacaccgaactgagatacctacagcgtgagctatgagaaagcgccacgcttcccgaagggagaaaggcggacaggtatccggtaagcggcagggtcggaacaggagagcgcacgagggagcttccagggggaaacgcctggtatctttatagtcctgtcgggtttcgccacctctgacttgagcgtcgatttttgtgatgctcgtcaggggggcggagcctatggaaaaacgccagcaacgcggcctttttacggttcctggccttttgctggccttgaagctgtccctgatggtcgtcatctacctgcctggacagcatggcctgcaacgcgggcatcccgatgccgccggaagcgagaagaatcataatggggaaggccatccagcctcgcgtcgcgaacgccagcaagacgtagcccagcgcgtcggccccgagatgcgccgcgtgcggctgctggagatggcggacgcgatggatatgttctgccaagggttggtttgcgcattcacagttctccgcaagaattgattggctccaattcttggagtggtgaatccgttagcgaggtgccgccctgcttcatccccgtggcccgttgctcgcgtttgctggcggtgtccccggaagaaatatatttgcatgtctttagttctatgatgacacaaaccccgcccagcgtcttgtcattggcgaattcgaacacgcagatgcagtcggggcggcgcggtccgaggtccacttcgcatattaaggtgacgcgtgtggcctcgaacaccgagcgaccctgcagcgacccgcttaacagcgtcaacagcgtgccgcagatcccggggggcaatgagatatgaaaaagcctgaactcaccgcgacgtctgtcgagaagtttctgatcgaaaagttcgacagcgtctccgacctgatgcagctctcggagggcgaagaatctcgtgctttcagcttcgatgtaggagggcgtggatatgtcctgcgggtaaatagctgcgccgatggtttctacaaagatcgttatgtttatcggcactttgcatcggccgcgctcccgattccggaagtgcttgacattggggaattcagcgagagcctgacctattgcatctcccgccgtgcacagggtgtcacgttgcaagacctgcctgaaaccgaactgcccgctgttctgcagccggtcgcggaggccatggatgcgatcgctgcggccgatcttagccagacgagcgggttcggcccattcggaccgcaaggaatcggtcaatacactacatggcgtgatttcatatgcgcgattgctgatccccatgtgtatcactggcaaactgtgatggacgacaccgtcagtgcgtccgtcgcgcaggctctcgatgagctgatgctttgggccgaggactgccccgaagtccggcacctcgtgcacgcggatttcggctccaacaatgtcctgacggacaatggccgcataacagcggtcattgactggagcgaggcgatgttcggggattcccaatacgaggtcgccaacatcttcttctggaggccgtggttggcttgtatggagcagcagacgcgctacttcgagcggaggcatccggagcttgcaggatcgccgcggctccgggcgtatatgctccgcattggtcttgaccaactctatcagagcttggttgacggcaatttcgatgatgcagcttgggcgcagggtcgatgcgacgcaatcgtccgatccggagccgggactgtcgggcgtacacaaatcgcccgcagaagcgcggccgtctggaccgatggctgtgtagaagtactcgccgatagtggaaaccgacgccccagcactcgtccggatcgggagatgggggaggctaactgaaacacggaaggagacaataccggaaggaacccgcgctatgacggcaataaaaagacagaataaaacgcacgggtgttgggtcgtttgttcataaacgcggggttcggtcccagggctggcactctgtcgataccccaccgagaccccattggggccaatacgcccgcgtttcttccttttccccaccccaccccccaagttcgggtgaaggcccagggctcgcagccaacgtcggggcggcaggccctgccatagccactggccccgtgggttagggacggggtcccccatggggaatggtttatggttcgtgggggttattattttgggcgttgcgtggggtcaggtccacgactggactgagcagacagacccatggtttttggatggcctgggcatggaccgcatgtactggcgcgacacgaacaccgggcgtctgtggctgccaaacacccccgacccccaaaaaccaccgcgcggatttctggcgtgccaagctagtcgaccaattctcatgtttgacagcttatcatcgcagatccgggcaacgttgttgccattgctgcaggcgcagaactggtaggtatggaagatctatacattgaatcaatattggcaattagccatattagtcattggttatatagcataaatcaatattggctattggccattgcatacgttgtatctatatcataatatgtacatttatattggctcatgtccaatatgaccgccat

SEQ ID NO: 84 - DNA, 20400 bp, Artificial Sequence
  Vector with soluble s4-1BBL ectodomain construct
accaaacaaagttgggtaaggatagttcaatcaatgatcatcttctagtgcacttaggattcaagatcctattatcagggacaagagcaggattagggatatctcgaggcgcgtgccaccatgcccatggggtctctgcaaccgctggccaccttgtacctgctggggatgctggtcgcttcctgcctcggagcctgtggctgtgcggctgccccagacatcaaggacctgctgagcagactggaggagctggaggggctggtatcctccctccgggagcagggatccttggacctgcggcagggcatgtttgcgcagctggtggcccaaaatgttctgctgatcgatgggcccctgagctggtacagtgacccaggcctggcaggcgtgtccctgacggggggcctgagctacaaagaggacacgaaggagctggtggtggccaaggctggagtctactatgtcttctttcaactagagctgcggcgcgtggtggccggcgagggctcaggctccgtttcacttgcgctgcacctgcagccactgcgctctgctgctggggccgccgccctggctttgaccgtggacctgccacccgcctcctccgaggctcggaactcggccttcggtttccagggccgcttgctgcacctgagtgccggccagcgcctgggcgtccatcttcacactgaggccagggcacgccatgcctggcagcttacccagggcgccacagtcttgggactcttccgggtgacccccgaaatcccagccggactcccttcaccgaggtcggaataaacgcgccatccatcattgttataaaaaacttaggattcaagatcctattatcagggacaagagcaggattagggatatccgagatggccacacttttaaggagcttagcattgttcaaaagaaacaaggacaaaccacccattacatcaggatccggtggagccatcagaggaatcaaacacattattatagtaccaatccctggagattcctcaattaccactcgatccagacttctggaccggttggtcaggttaattggaaacccggatgtgagcgggcccaaactaacaggggcactaataggtatattatccttatttgtggagtctccaggtcaattgattcagaggatcaccgatgaccctgacgttagcataaggctgttagaggttgtccagagtgaccagtcacaatctggccttaccttcgcatcaagaggtaccaacatggaggatgaggcggaccaatacttttcacatgatgatccaattagtagtgatcaatccaggttcggatggttcgagaacaaggaaatctcagatattgaagtgcaagaccctgagggattcaacatgattctgggtaccatcctagcccaaatttgggtcttgctcgcaaaggcggttacggccccagacacggcagctgattcggagctaagaaggtggataaagtacacccaacaaagaagggtggttggtgaatttagattggagagaaaatggttggatgtggtgaggaacaggattgccgaggacctctccttacgccgattcatggtcgctctaatcctggatatcaagagaacacccggaaacaaacccaggattgctgaaatgatatgtgacattgatacatatatcgtagaggcaggattagccagttttatcctgactattaagtttgggatagaaactatgtatcctgctcttggactgcatgaatttgctggtgagttatccacacttgagtccttgatgaacctttaccagcaaatgggggaaactgcaccctacatggtaatcctggagaactcaattcagaacaagttcagtgcaggatcataccctctgctctggagctatgccatgggagtaggagtggaacttgaaaactccatgggaggtttgaactttggccgatcttactttgatccagcatattttagattagggcaagagatggtaaggaggtcagctggaaaggtcagttccacattggcatctgaactcggtatcactgccgaggatgcaaggcttgtttcagagattgcaatgcatactactgaggacaagatcagtagagcggttggacccagacaagcccaagtatcatttctacacggtgatcaaagtgagaatgagctaccgagattggggggcaaggaagataggagggtcaaacagagtcgaggagaagccagggagagctacagagaaaccgggcccagcagagcaagtgatgcgagagctgcccatcttccaaccggcacacccctagacattgacactgcaacggagtccagccaagatccgcaggacagtcgaaggtcagctgacgccctgcttaggctgcaagccatggcaggaatctcggaagaacaaggctcagacacggacacccctatagtgtacaatgacagaaatcttctagactaggtgcgagaggccgagggccagaacaacatccgcctaccctccatcattgttataaaaaacttaggaaccaggtccacacagccgccagcccatcaaccatccactcccacgattggagccaatggcagaagagcaggcacgccatgtcaaaaacggactggaatgcatccgggctctcaaggccgagcccatcggctcactggccatcgaggaagctatggcagcatggtcagaaatatcagacaacccaggacaggagcgagccacctgcagggaagagaaggcaggcagttcgggtctcagcaaaccatgcctctcagcaattggatcaactgaaggcggtgcacctcgcatccgcggtcagggacctggagagagcgatgacgacgctgaaactttgggaatccccccaagaaatctccaggcatcaagcactgggttacagtgttattacgtttatgatcacagcggtgaagcggttaagggaatccaagatgctgactctatcatggttcaatcaggccttgatggtgatagcaccctctcaggaggagacaatgaatctgaaaacagcgatgtggatattggcgaacctgataccgagggatatgctatcactgaccggggatctgctcccatctctatggggttcagggcttctgatgttgaaactgcagaaggaggggagatccacgagctcctgagactccaatccagaggcaacaactttccgaagcttgggaaaactctcaatgttcctccgcccccggaccccggtagggccagcacttccgggacacccattaaaaagggcacagacgcgagattagcctcatttggaacggagatcgcgtctttattgacaggtggtgcaacccaatgtgctcgaaagtcaccctcggaaccatcagggccaggtgcacctgcggggaatgtccccgagtgtgtgagcaatgccgcactgatacaggagtggacacccgaatctggtaccacaatctccccgagatcccagaataatgaagaagggggagactattatgatgatgagctgttctctgatgtccaagatattaaaacagccttggccaaaatacacgaggataatcagaagataatctccaagctagaatcactgctgttattgaagggagaagttgagtcaattaagaagcagatcaacaggcaaaatatcagcatatccaccctggaaggacacctctcaagcatcatgatcgccattcctggacttgggaaggatcccaacgaccccactgcagatgtcgaaatcaatcccgacttgaaacccatcataggcagagattcaggccgagcactggccgaagttctcaagaaacccgttgccagccgacaactccaaggaatgacaaatggacggaccagttccagaggacagctgctgaaggaatttcagctaaagccgatcgggaaaaagatgagctcagccgtcgggtttgttcctgacaccggccctgcatcacgcagtgtaatccgctccattataaaatccagccggctagaggaggatcggaagcgttacctgatgactctccttgatgatatcaaaggagccaatgatcttgccaagttccaccagatgctgatgaagataataatgaagtagctacagctcaacttacctgccaaccccatgccagtcgacccaactagtacaacctaaatccattataaaaaacttaggagcaaagtgattgcctcccaagttccacaatgacagagacctacgacttcgacaagtcggcatgggacatcaaagggtcgatcgctccgatacaacccaccacctacagtgatggcaggctggtgccccaggtcagagtcatagatcctggtctaggcgacaggaaggatgaatgctttatgtacatgtttctgctgggggttgttgaggacagcgattccctagggcctccaatcgggcgagcatttgggtccctgcccttaggtgttggcagatccacagcaaagcccgaaaaactcctcaaagaggccactgagcttgacatagttgttagacgtacagcagggctcaatgaaaaactggtgttctacaacaacaccccactaactctcctcacaccttggagaaaggtcctaacaacagggagtgtcttcaacgcaaaccaagtgtgcaatgcggttaatctgataccgctcgataccccgcagaggttccgtgttgtttatatgagcatcacccgtctttcggataacgggtattacaccgttcctagaagaatgctggaattcagatcggtcaatgcagtggccttcaacctgctggtgacccttaggattgacaaggcgataggccctgggaagatcatcgacaatacagagcaacttcctgaggcaacatttatggtccacatcgggaacttcaggagaaagaagagtgaagtctactctgccgattattgcaaaatgaaaatcgaaaagatgggcctggtttttgcacttggtgggatagggggcaccagtcttcacattagaagcacaggcaaaatgagcaagactctccatgcacaactcgggttcaagaagaccttatgttacccgctgatggatatcaatgaagaccttaatcgattactctggaggagcagatgcaagatagtaagaatccaggcagttttgcagccatcagttcctcaagaattccgcatttacgacgacgtgatcataaatgatgaccaaggactattcaaagttctgtagaccgtagtgcccagcaatgcccgaaaacgacccccctcacaatgacagccagaaggcccggacaaaaaagccccctccgaaagactccacggaccaagcgagaggccagccagcagccgacggcaagcgcgaacaccaggcggccccagcacagaacagccccgacacaaggccaccaccagccaccccaatctgcatcctcctcgtgggacccccgaggaccaacccccaaggctgcccccgatccaaaccaccaaccgcatccccaccacccccgggaaagaaacccccagcaattggaaggcccctccccctcttcctcaacacaagaactccacaaccgaaccgcacaagcgaccgaggtgacccaaccgcaggcatccgactccctagacagatcctctctccccggcaaactaaacaaaacttagggccaaggaacatacacacccaacagaacccagaccccggcccacggcgccgcgcccccaacccccgacaaccagagggagcccccaaccaatcccgccggctcccccggtgcccacaggcagggacaccaacccccgaacagacccagcacccaaccatcgacaatccaagacgggggggcccccccaaaaaaaggcccccaggggccgacagccagcaccgcgaggaagcccacccaccccacacacgaccacggcaaccaaaccagaacccagaccaccctgggccaccagctcccagactcggccatcaccccgcagaaaggaaaggccacaacccgcgcaccccagccccgatccggcggggagccacccaacccgaaccagcacccaagagcgatccccgaaggacccccgaaccgcaaaggacaccagtatcccacagcctctccaagtcccccggtctcctcctcttctcgaagggaccaaaagatcaatccaccacacccgacgacactcaactccccacccctaaaggagacaccgggaatcccagaatcaagactcatccaatgtccatcatgggtctcaaggtgaacgtctctgccatattcatggcagtactgttaactctccaaacacccaccggtcaaatccattggggcaatctctctaagataggggtggtaggaataggaagtgcaagctacaaagttatgactcgttccagccatcaatcattagtcataaaattaatgcccaatataactctcctcaataactgcacgagggtagagattgcagaatacaggagactactgagaacagttttggaaccaattagagatgcacttaatgcaatgacccagaatataagaccggttcagagtgtagcttcaagtaggagacacaagagatttgcgggagtagtcctggcaggtgcggccctaggcgttgccacagctgctcagataacagccggcattgcacttcaccagtccatgctgaactctcaagccatcgacaatctgagagcgagcctggaaactactaatcaggcaattgaggcaatcagacaagcagggcaggagatgatattggctgttcagggtgtccaagactacatcaataatgagctgataccgtctatgaaccaactatcttgtgatttaatcggccagaagctcgggctcaaattgctcagatactatacagaaatcctgtcattatttggccccagtttacgggaccccatatctgcggagatatctatccaggctttgagctatgcgcttggaggagacatcaataaggtgttagaaaagctcggatacagtggaggtgatttactgggcatcttagagagcggaggcatcaaggcccggataactcacgtcgacacagagtcctacttcattgtcctcagtatagcctatccgacgctgtccgagattaagggggtgattgtccaccggctagagggggtctcgtacaacataggctctcaagagtggtataccactgtgcccaagtatgttgcaacccaagggtaccttatctcgaattttgatgagtcatcgtgtactttcatgccagaggggactgtgtgcagccaaaatgccttgtacccgatgagtcctctgctccaagaatgcctccgggggtacaccaagtcctgtgctcgtacactcgtatccgggtcttttgggaaccggttcattttatcacaagggaacctaatagccaattgtgcatcaatcctttgcaagtgttacacaacaggaacgatcattaatcaagaccctgacaagatcctaacatacattgctgccgatcactgcccggtagtcgaggtgaacggcgtgatcatccaagtcgggagcaggaggtatccagacgctgtgtacttgcacagaattgacctcggtcctcccatatcattggagaggttggacgtagggacaaatctggggaatgcaattgctaagttggaggatgccaaggaattgttggagtcatcggaccagatattgaggagtatgaaaggtttatcgagcactagcatagtctacatcctgattgcagtgtgtcttggagggttgatagggatccccgctttaatatgttgctgcagggggcgttgtaacaaaaagggagaacaagttggtatgtcaagaccaggcctaaagcctgatcttacgggaacatcaaaatcctatgtaaggtcgctctgatcctctacaactcttgaaacacaaatgtcccacaagtctcctcttcgtcatcaagcaaccaccgcacccagcatcaagcccacctgaaattatctccggcttccctctggccgaacaatatcggtagttaattaaaacttagggtgcaagatcatccacaatgtcaccacaacgagaccggataaatgccttctacaaagataacccccatcccaagggaagtaggatagtcattaacagagaacatcttatgattgatagaccttatgttttgctggctgttctgtttgtcatgtttctgagcttgatcgggttgctagccattgcaggcattagacttcatcgggcagccatctacaccgcagagatccataaaagcctcagcaccaatctagatgtaactaactcaatcgagcatcaggtcaaggacgtgctgacaccactcttcaaaatcatcggtgatgaagtgggcctgaggacacctcagagattcactgacctagtgaaattcatctctgacaagatcaagttccttaatccggatagggagtacgacttcagagatctcacttggtgtatcaacccgccagagagaatcaaattggattatgatcaatactgtgcagatgtggctgctgaagagctcatgaatgcattggtgaactcaactctactggagaccagaacaaccaatcagttcctagctgtctcaaagggaaactgctcagggcccactacaatcagaggtcaattctcaaacatgtcgctgtccctgttagacttgtatttaggtcgaggttacaatgtgtcatctatagtcactatgacatcccagggaatgtatgggggaacttacctagtggaaaagcctaatctgagcagcaaaaggtcagagttgtcacaactgagcatgtaccgagtgtttgaagtaggtgttatcagaaatccgggtttgggggctccggtgttccatatgacaaactatcttgagcaaccagtcagtaatgatctcagcaactgtatggtggctttgggggagctcaaactcgcagccctttgtcacggggaagattctatcacaattccctatcagggatcagggaaaggtgtcagcttccagctcgtcaagctaggtgtctggaaatccccaaccgacatgcaatcctgggtccccttatcaacggatgatccagtgatagacaggctttacctctcatctcacagaggtgttatcgctgacaatcaagcaaaatgggctgtcccgacaacacgaacagatgacaagttgcgaatggagacatgcttccaacaggcgtgtaagggtaaaatccaagcactctgcgagaatcccgagtgggcaccattgaaggataacaggattccttcatacggggtcttgtctgttgatctgagtctgacagttgagcttaaaatcaaaattgcttcgggattcgggccattgatcacacacggttcagggatggacctatacaaatccaaccacaacaatgtgtattggctgactatcccgccaatgaagaacctagccttaggtgtaatcaacacattggagtggataccgagattcaaggttagtccctacctcttcactgtcccaattaaggaagcaggcgaagactgccatgccccaacatacctacctgcggaggtggatggtgatgtcaaactcagttccaatctggtgattctacctggtcaagatctccaatatgttttggcaacctacgatacttccagggttgaacatgctgtggtttattacgtttacagcccaagccgctcattttcttacttttatccttttaggttgcctataaagggggtccccatcgaattacaagtggaatgcttcacatgggaccaaaaactctggtgccgtcacttctgtgtgcttgcggactcagaatctggtggacatatcactcactctgggatggtgggcatgggagtcagctgcacagtcacccgggaagatggaaccaatcgcagatagggctgctagtgaaccaatcacatgatgtcacccagacatcaggcatacccactagtgtgaaatagacatcagaattaagaaaaacgtagggtccaagtggttccccgttatggactcgctatctgtcaaccagatcttataccctgaagttcacctagatagcccgatagttaccaataagatagtagccatcctggagtatgctcgagtccctcacgcttacagcctggaggaccctacactgtgtcagaacatcaagcaccgcctaaaaaacggattttccaaccaaatgattataaacaatgtggaagttgggaatgtcatcaagtccaagcttaggagttatccggcccactctcatattccatatccaaattgtaatcaggatttatttaacatagaagacaaagagtcaacgaggaagatccgtgaactcctcaaaaaggggaattcgctgtactccaaagtcagtgataaggttttccaatgcttaagggacactaactcacggcttggcctaggctccgaattgagggaggacatcaaggagaaagttattaacttgggagtttacatgcacagctcccagtggtttgagccctttctgttttggtttacagtcaagactgagatgaggtcagtgattaaatcacaaacccatacttgccataggaggagacacacacctgtattcttcactggtagttcagttgagttgctaatctctcgtgaccttgttgctataatcagtaaagagtctcaacatgtatattacctgacatttgaactggttttgatgtattgtgatgtcatagaggggaggttaatgacagagaccgctatgactattgatgctaggtatacagagcttctaggaagagtcagatacatgtggaaactgatagatggtttcttccctgcactcgggaatccaacttatcaaattgtagccatgctggagcctctttcacttgcttacctgcagctgagggatataacagtagaactcagaggtgctttccttaaccactgctttactgaaatacatgatgttcttgaccaaaacgggttttctgatgaaggtacttatcatgagttaattgaagctctagattacattttcataactgatgacatacatctgacaggggagattttctcatttttcagaagtttcggccaccccagacttgaagcagtaacggctgctgaaaatgttaggaaatacatgaatcagcctaaagtcattgtgtatgagactctgatgaaaggtcatgccatattttgtggaatcataatcaacggctatcgtgacaggcacggaggcagttggccaccgctgaccctccccctgcatgctgcagacacaatccggaatgctcaagcttcaggtgaagggttaacacatgagcagtgcgttgataactggaaatcttttgctggagtgaaatttggctgctttatgcctcttagcctggatagtgatctgacaatgtacctaaaggacaaggcacttgctgctctccaaagggaatgggattcagtttacccgaaagagttcctgcgttacgaccctcccaagggaaccgggtcacggaggcttgtagatgttttccttaatgattcgagctttgacccatatgatgtgataatgtatgttgtaagtggagcttacctccatgaccctgagttcaacctgtcttacagcctgaaagaaaaggagatcaaggaaacaggtagactttttgctaaaatgacttacaaaatgagggcatgccaagtgattgctgaaaatctaatctcaaacgggattggcaaatattttaaggacaatgggatggccaaggatgagcacgatttgactaaggcactccacactctagctgtctcaggagtccccaaagatctcaaagaaagtcacaggggggggccagtcttaaaaacctactcccgaagcccagtccacacaagtaccaggaacgtgagagcagcaaaagggtttatagggttccctcaagtaattcggcaggaccaagacactgatcatccggagaatatggaagcttacgagacagtcagtgcatttatcacgactgatctcaagaagtactgccttaattggagatatgagaccatcagcttgtttgcacagaggctaaatgagatttacggattgccctcatttttccagtggctgcataagaggcttgagacctctgtcctgtatgtaagtgaccctcattgcccccccgaccttgacgcccatatcccgttatataaagtccccaatgatcaaatcttcattaagtaccctatgggaggtatagaagggtattgtcagaagctgtggaccatcagcaccattccctatctatacctggctgcttatgagagcggagtaaggattgcttcgttagtgcaaggggacaatcagaccatagccgtaacaaaaagggtacccagcacatggccctacaaccttaagaaacgggaagctgctagagtaactagagattactttgtaattcttaggcaaaggctacatgatattggccatcacctcaaggcaaatgagacaattgtttcatcacatttttttgtctattcaaaaggaatatattatgatgggctacttgtgtcccaatcactcaagagcatcgcaagatgtgtattctggtcagagactatagttgatgaaacaagggcagcatgcagtaatattgctacaacaatggctaaaagcatcgagagaggttatgaccgttaccttgcatattccctgaacgtcctaaaagtgatacagcaaattctgatctctcttggcttcacaatcaattcaaccatgacccgggatgtagtcatacccctcctcacaaacaacgacctcttaataaggatggcactgttgcccgctcctattggggggatgaattatctgaatatgagcaggctgtttgtcagaaacatcggtgatccagtaacatcatcaattgctgatctcaagagaatgattctcgcctcactaatgcctgaagagaccctccatcaagtaatgacacaacaaccgggggactcttcattcctagactgggctagcgacccttactcagcaaatcttgtatgtgtccagagcatcactagactcctcaagaacataactgcaaggtttgtcctgatccatagtccaaacccaatgttaaaaggattattccatgatgacagtaaagaagaggacgagggactggcggcattcctcatggacaggcatattatagtacctagggcagctcatgaaatcctggatcatagtgtcacaggggcaagagagtctattgcaggcatgctggataccacaaaaggcttgattcgagccagcatgaggaagggggggttaacctctcgagtgataaccagattgtccaattatgactatgaacaattcagagcagggatggtgctattgacaggaagaaagcgaaatgtcctcattgacaaagagtcatgttcagtgcagctggcgagagctctaagaagccatatgtgggcgaggctagctcgaggacggcctatttacggccttgaggtccctgatgtactagaatctatgcgaggccaccttattcggcgtcatgagacatgtgtcatctgcgagtgtggatcagtcaactacggatggttttttgtcccctcgggttgccaactggatgatattgacaaggaaacatcatccttgagagtcccatatattggttctaccactgatgagagaacagacatgaagcttgccttcgtaagagccccaagtcgatccttgcgatctgctgttagaatagcaacagtgtactcatgggcttacggtgatgatgatagctcttggaacgaagcctggttgttggctaggcaaagggccaatgtgagcctggaggagctaagggtgatcactcccatctcaacttcgactaatttagcgcataggttgagggatcgtagcactcaagtgaaatactcaggtacatcccttgtccgagtggcgaggtataccacaatctccaacgacaatctctcatttgtcatatcagataagaaggttgatactaactttatataccaacaaggaatgcttctagggttgggtgttttagaaacattgtttcgactcgagaaagataccggatcatctaacacggtattacatcttcacgtcgaaacagattgttgcgtgatcccgatgatagatcatcccaggatacccagctcccgcaagctagagctgagggcagagctatgtaccaacccattgatatatgataatgcacctttaattgacagagatgcaacaaggctatacacccagagccataggaggcaccttgtggaatttgttacatggtccacaccccaactatatcacattttagctaagtccacagcactatctatgattgacctggtaacaaaatttgagaaggaccatatgaatgaaatttcagctctcataggggatgacgatatcaatagtttcataactgagtttctgctcatagagccaagattattcactatctacttgggccagtgtgcggccatcaattgggcatttgatgtacattatcatagaccatcagggaaatatcagatgggtgagctgttgtcatcgttcctttctagaatgagcaaaggagtgtttaaggtgcttgtcaatgctctaagccacccaaagatctacaagaaattctggcattgtggtattatagagcctatccatggtccttcacttgatgctcaaaacttgcacacaactgtgtgcaacatggtttacacatgctatatgacctacctcgacctgttgttgaatgaagagttagaagagttcacatttctcttgtgtgaaagcgacgaggatgtagtaccggacagattcgacaacatccaggcaaaacacttatgtgttctggcagatttgtactgtcaaccagggacctgcccaccaattcgaggtctaagaccggtagagaaatgtgcagttctaaccgaccatatcaaggcagaggctatgttatctccagcaggatcttcgtggaacataaatccaattattgtagaccattactcatgctctctgacttatctccggcgaggatcgatcaaacagataagattgagagttgatccaggattcattttcgacgccctcgctgaggtaaatgtcagtcagccaaagatcggcagcaacaacatctcaaatatgagcatcaaggctttcagacccccacacgatgatgttgcaaaattgctcaaagatatcaacacaagcaagcacaatcttcccatttcagggggcaatctcgccaattatgaaatccatgctttccgcagaatcgggttgaactcatctgcttgctacaaagctgttgagatatcaacattaattaggagatgccttgagccaggggaggacggcttgttcttgggtgagggatcgggttctatgttgatcacttataaggagatacttaaactaaacaagtgcttctataatagtggggtttccgccaattctagatctggtcaaagggaattagcaccctatccctccgaagttggccttgtcgaacacagaatgggagtaggtaatattgtcaaagtgctctttaacgggaggcccgaagtcacgtgggtaggcagtgtagattgcttcaatttcatagttagtaatatccctacctctagtgtggggtttatccattcagatatagagaccttgcctgacaaagatactatagagaagctagaggaattggcagccatcttatcgatggctctgctcctgggcaaaataggatcaatactggtgattaagcttatgcctttcagcggggattttgttcagggatttataagttatgtagggtctcattatagagaagtgaaccttgtataccctagatacagcaacttcatctctactgaatcttatttggttatgacagatctcaaggctaaccggctaatgaatcctgaaaagattaagcagcagataattgaatcatctgtgaggacttcacctggacttataggtcacatcctatccattaagcaactaagctgcatacaagcaattgtgggagacgcagttagtagaggtgatatcaatcctactctgaaaaaacttacacctatagagcaggtgctgatcaattgcgggttggcaattaacggacctaagctgtgcaaagaattgatccaccatgatgttgcctcagggcaagatggattgcttaattctatactcatcctctacagggagttggcaagattcaaagacaaccaaagaagtcaacaagggatgttccacgcttaccccgtattggtaagtagcaggcaacgagaacttatatctaggatcacccgcaaattctgggggcacattcttctttactccgggaacagaaagttgataaataagtttatccagaatctcaagtccggctatctgatactagacttacaccagaatatcttcgttaagaatctatccaagtcagagaaacagattattatgacggggggtttgaaacgtgagtgggtttttaaggtaacagtcaaggagaccaaagaatggtataagttagtcggatacagtgccctgattaaggactaattggttgaactccggaaccctaatcctgccctaggtggttaggcattatttgcaatatattaaagaaaactttgaaaatacgaagtttctattcccagctttgtctggtggccggcatggtcccagcctcctcgctggcgccggctgggcaacattccgaggggaccgtcccctcggtaatggcgaatgggacgcggccggtcgatcgacgatccggctgctaacaaagcccgaaaggaagctgagttggctgctgccaccgctgagcaataactagcataaccccttggggcctctaaacgggtcttgaggggttttttgctgaaaggaggaactatatccggatcgagatcaattctgtgagcgtatggcaaacgaaggaaaaatagttatagtagccgcactcgatgggacatttcaacgtaaaccgtttaataatattttgaatcttattccattatctgaaatggtggtaaaactaactgctgtgtgtatgaaatgctttaaggaggcttccttttctaaacgattgggtgaggaaaccgagatagaaataataggaggtaatgatatgtatcaatcggtgtgtagaaagtgttacatcgactcataatattatattttttatctaaaaaactaaaaataaacattgattaaattttaatataatacttaaaaatggatgttgtgtcgttagataaaccgtttatgtattttgaggaaattgataatgagttagattacgaaccagaaagtgcaaatgaggtcgcaaaaaaactgccgtatcaaggacagttaaaactattactaggagaattattttttcttagtaagttacagcgacacggtatattagatggtgccaccgtagtgtatataggatctgctcccggtacacatatacgttatttgagagatcatttctataatttaggagtgatcccgaaaggaagctgagttggctgctgccaccgctgagcaataactagcataaccccttggggcctctaaacgggtcttgaggggttttttgctgaaaggaggaacgcgcctgatgcggtattttctccttacgcatctgtgcggtatttcacaccgcatatatggtgcactctcagtacaatctgctctgatgccgcatagttaagccagccccgacacccgccaacacccgctgacgcgccctgacgggcttgtctgctcccggcatccgcttacagacaagctgtgaccgtctccgggagctgcatgtgtcagaggttttcaccgtcatcaccgaaacgcgcgagacgaaagggcctcgtgatacgcctatttttataggttaatgtcatgataataatggtttcttagacgtcaggtggcacttttcggggaaatgtgcgcggaacccctatttgtttatttttctaaatacattcaaatatgtatccgctcatgagacaataaccctgataaatgcttcaataatattgaaaaaggaagagtatgagtattcaacatttccgtgtcgcccttattcccttttttgcggcattttgccttcctgtttttgctcacccagaaacgctggtgaaagtaaaagatgctgaagatcagttgggtgcacgagtgggttacatcgaactggatctcaacagcggtaagatccttgagagttttcgccccgaagaacgttttccaatgatgagcacttttaaagttctgctatgtggcgcggtattatcccgtattgacgccgggcaagagcaactcggtcgccgcatacactattctcagaatgacttggttgagtactcaccagtcacagaaaagcatcttacggatggcatgacagtaagagaattatgcagtgctgccataaccatgagtgataacactgcggccaacttacttctgacaacgatcggaggaccgaaggagctaaccgcttttttgcacaacatgggggatcatgtaactcgccttgatcgttgggaaccggagctgaatgaagccataccaaacgacgagcgtgacaccacgatgcctgtagcaatggcaacaacgttgcgcaaactattaactggcgaactacttactctagcttcccggcaacaattaatagactggatggaggcggataaagttgcaggaccacttctgcgctcggcccttccggctggctggtttattgctgataaatctggagccggtgagcgtgggtctcgcggtatcattgcagcactggggccagatggtaagccctcccgtatcgtagttatctacacgacggggagtcaggcaactatggatgaacgaaatagacagatcgctgagataggtgcctcactgattaagcattggtaactgtcagaccaagtttactcatatatactttagattgatttaaaacttcatttttaatttaaaaggatctaggtgaagatcctttttgataatctcatgaccaaaatcccttaacgtgagttttcgttccactgagcgtcagaccccgtagaaaagatcaaaggatcttcttgagatcctttttttctgcgcgtaatctgctgcttgcaaacaaaaaaaccaccgctaccagcggtggtttgtttgccggatcaagagctaccaactctttttccgaaggtaactggcttcagcagagcgcagataccaaatactgtccttctagtgtagccgtagttaggccaccacttcaagaactctgtagcaccgcctacatacctcgctctgctaatcctgttaccagtggctgctgccagtggcgataagtcgtgtcttaccgggttggactcaagacgatagttaccggataaggcgcagcggtcgggctgaacggggggttcgtgcacacagcccagcttggagcgaacgacctacaccgaactgagatacctacagcgtgagcattgagaaagcgccacgcttcccgaagggagaaaggcggacaggtatccggtaagcggcagggtcggaacaggagagcgcacgagggagcttccagggggaaacgcctggtatctttatagtcctgtcgggtttcgccacctctgacttgagcgtcgatttttgtgatgctcgtcaggggggcggagcctatggaaaaacgccagcaacgcggcctttttacggttcctggccttttgctggccttttgctcacatgttctttcctgcgttatcccctgattctgtggataaccgtattaccgcctttgagtgagctgataccgctcgccgcagccgaacgaccgagcgcagcgagtcagtgagcgaggaagcggaagagcgcccaatacgcaaaccgcctctccccgcgcgttggccgattcattaatgcagctggcacgacaggtttcccgactggaaagcgggcagtgagcgcaacgcaattaatgtgagttagctcactcattaggcaccccaggctttacactttatgcttccggctcgtatgttgtgtggaattgtgagcggataacaatttcacacaggaaacagctatgaccatgattacgccaagcttacgcgtcctggcattatgcccagtacatgaccttatgggactttcctacttggcagtacatctacgtattagtcatcgctattaccatggtgatgcggttttggcagtacatcaatgggcgtggatagcggtttgactcacggggatttccaagtctccaccccattgacgtcaatgggagtttgttttggcaccaaaatcaacgggactttccaaaatgtcgtaacaactccgccccattgacgcaaatgggcggtaggcgtgtacggtgggaggtctatataagcagagctcgtttagtgaaccgtgg

SEQ ID NO: 85 - DNA, 35158 bp, Artificial Sequence
  Vector with soluble s4-1BBL ectodomain construct
catcatcaataatataccttattttggattgaagccaatatgataatgagggggtggagtttgtgacgtggcgcggggcgtgggaacggggcgggtgacgtagtagtgtggcggaagtgtgatgttgcaagtgtggcggaacacatgtaagcgacggatgtggcaaaagtgacgtttttggtgtgcgccggtgtacacaggaagtgacaattttcgcgcggttttaggcggatgttgtagtaaatttgggcgtaaccgagtaagatttggccattttcgcgggaaaactgaataagaggaagtgaaatctgaataattttgtgttactcatagcgcgtaatatttgtctagggccgcggggactttgaccgtttacgtggagactcgcccaggtgtttttctcaggtgttttccgcgttccgggtcaaagttggcgttttattattatagtcagtcgaagcttggatccggtacctctagaattctcgagcggccgctagcgacatcggatctcccgatcccctatggtcgactctcagtacaatctgctctgatgccgcatagttaagccagtatctgctccctgcttgtgtgttggaggtcgctgagtagtgcgcgagcaaaatttaagctacaacaaggcaaggcttgaccgacaattgcatgaagaatctgcttagggttaggcgttttgcgctgcttcgcgatgtacgggccagatatacgcgttgacattgattattgactagttattaatagtaatcaattacggggtcattagttcatagcccatatatggagttccgcgttacataacttacggtaaatggcccgcctggctgaccgcccaacgacccccgcccattgacgtcaataatgacgtatgttcccatagtaacgccaatagggactttccattgacgtcaatgggtggactatttacggtaaactgcccacttggcagtacatcaagtgtatcatatgccaagtacgccccctattgacgtcaatgacggtaaatggcccgcctggcattatgcccagtacatgaccttatgggactttcctacttggcagtacatctacgtattagtcatcgctattaccatggtgatgcggttttggcagtacatcaatgggcgtggatagcggtttgactcacggggatttccaagtctccaccccattgacgtcaatgggagtttgttttggcaccaaaatcaacgggactttccaaaatgtcgtaacaactccgccccattgacgcaaatgggcggtaggcgtgtacggtgggaggtctatataagcagagctctctggctaactagagaacccactgcttactggcttatcgaaattaatacgactcactatagggagacccaagctggctagttaagctatcaacaagtttgtacaaaaaagcaggctgccaccatgcccatggggtctctgcaaccgctggccaccttgtacctgctggggatgctggtcgcttcctgcctcggagcctgtggctgtgcggctgccccagacatcaaggacctgctgagcagactggaggagctggaggggctggtatcctccctccgggagcagggatccttggacctgcggcagggcatgtttgcgcagctggtggcccaaaatgttctgctgatcgatgggcccctgagctggtacagtgacccaggcctggcaggcgtgtccctgacggggggcctgagctacaaagaggacacgaaggagctggtggtggccaaggctggagtctactatgtcttctttcaactagagctgcggcgcgtggtggccggcgagggctcaggctccgtttcacttgcgctgcacctgcagccactgcgctctgctgctggggccgccgccctggctttgaccgtggacctgccacccgcctcctccgaggctcggaactcggccttcggtttccagggccgcttgctgcacctgagtgccggccagcgcctgggcgtccatcttcacactgaggccagggcacgccatgcctggcagcttacccagggcgccacagtcttgggactcttccgggtgacccccgaaatcccagccggactcccttcaccgaggtcggaataaacccagctttcttgtacaaagtggttgatctagagggcccgcggttcgaaggtaagcctatccctaaccctctcctcggtctcgattctacgcgtaccggttagtaatgagtttaaacgggggaggctaactgaaacacggaaggagacaataccggaaggaacccgcgctatgacggcaataaaaagacagaataaaacgcacgggtgttgggtcgtttgttcataaacgcggggttcggtcccagggctggcactctgtcgataccccaccgagaccccattggggccaatacgcccgcgtttcttccttttccccaccccaccccccaagttcgggtgaaggcccagggctcgcagccaacgtcggggcggcaggccctgccatagcagatccgattcgacagatcactgaaatgtgtgggcgtggcttaagggtgggaaagaatatataaggtgggggtcttatgtagttttgtatctgttttgcagcagccgccgccgccatgagcaccaactcgtttgatggaagcattgtgagctcatatttgacaacgcgcatgcccccatgggccggggtgcgtcagaatgtgatgggctccagcattgatggtcgccccgtcctgcccgcaaactctactaccttgacctacgagaccgtgtctggaacgccgttggagactgcagcctccgccgccgcttcagccgctgcagccaccgcccgcgggattgtgactgactttgctttcctgagcccgcttgcaagcagtgcagcttcccgttcatccgcccgcgatgacaagttgacggctcttttggcacaattggattctttgacccgggaacttaatgtcgtttctcagcagctgttggatctgcgccagcaggtttctgccctgaaggcttcctcccctcccaatgcggtttaaaacataaataaaaaaccagactctgtttggatttggatcaagcaagtgtcttgctgtctttatttaggggttttgcgcgcgcggtaggcccgggaccagcggtctcggtcgttgagggtcctgtgtattttttccaggacgtggtaaaggtgactctggatgttcagatacatgggcataagcccgtctctggggtggaggtagcaccactgcagagcttcatgctgcggggtggtgttgtagatgatccagtcgtagcaggagcgctgggcgtggtgcctaaaaatgtctttcagtagcaagctgattgccaggggcaggcccttggtgtaagtgtttacaaagcggttaagctgggatgggtgcatacgtggggatatgagatgcatcttggactgtatttttaggttggctatgttcccagccatatccctccggggattcatgttgtgcagaaccaccagcacagtgtatccggtgcacttgggaaatttgtcatgtagcttagaaggaaatgcgtggaagaacttggagacgcccttgtgacctccaagattttccatgcattcgtccataatgatggcaatgggcccacgggcggcggcctgggcgaagatatttctgggatcactaacgtcatagttgtgttccaggatgagatcgtcataggccatttttacaaagcgcgggcggagggtgccagactgcggtataatggttccatccggcccaggggcgtagttaccctcacagatttgcatttcccacgctttgagttcagatggggggatcatgtctacctgcggggcgatgaagaaaacggtttccggggtaggggagatcagctgggaagaaagcaggttcctgagcagctgcgacttaccgcagccggtgggcccgtaaatcacacctattaccgggtgcaactggtagttaagagagctgcagctgccgtcatccctgagcaggggggccacttcgttaagcatgtccctgactcgcatgttttccctgaccaaatccgccagaaggcgctcgccgcccagcgatagcagttcttgcaaggaagcaaagtttttcaacggtttgagaccgtccgccgtaggcatgcttttgagcgtttgaccaagcagttccaggcggtcccacagctcggtcacctgctctacggcatctcgatccagcatatctcctcgtttcgcgggttggggcggctttcgctgtacggcagtagtcggtgctcgtccagacgggccagggtcatgtctttccacgggcgcagggtcctcgtcagcgtagtctgggtcacggtgaaggggtgcgctccgggctgcgcgctggccagggtgcgcttgaggctggtcctgctggtgctgaagcgctgccggtcttcgccctgcgcgtcggccaggtagcatttgaccatggtgtcatagtccagcccctccgcggcgtggcccttggcgcgcagcttgcccttggaggaggcgccgcacgaggggcagtgcagacttttgagggcgtagagcttgggcgcgagaaataccgattccggggagtaggcatccgcgccgcaggccccgcagacggtctcgcattccacgagccaggtgagctctggccgttcggggtcaaaaaccaggtttcccccatgctttttgatgcgtttcttacctctggtttccatgagccggtgtccacgctcggtgacgaaaaggctgtccgtgtccccgtatacagacttgagaggcctgtcctcgagcggtgttccgcggtcctcctcgtatagaaactcggaccactctgagacaaaggctcgcgtccaggccagcacgaaggaggctaagtgggaggggtagcggtcgttgtccactagggggtccactcgctccagggtgtgaagacacatgtcgccctcttcggcatcaaggaaggtgattggtttgtaggtgtaggccacgtgaccgggtgttcctgaaggggggctataaaagggggtgggggcgcgttcgtcctcactctcttccgcatcgctgtctgcgagggccagctgttggggtgagtactccctctgaaaagcgggcatgacttctgcgctaagattgtcagtttccaaaaacgaggaggatttgatattcacctggcccgcggtgatgcctttgagggtggccgcatccatctggtcagaaaagacaatctttttgttgtcaagcttggtggcaaacgacccgtagagggcgttggacagcaacttggcgatggagcgcagggtttggtttttgtcgcgatcggcgcgctccttggccgcgatgtttagctgcacgtattcgcgcgcaacgcaccgccattcgggaaagacggtggtgcgctcgtcgggcaccaggtgcacgcgccaaccgcggttgtgcagggtgacaaggtcaacgctggtggctacctctccgcgtaggcgctcgttggtccagcagaggcggccgcccttgcgcgagcagaatggcggtagggggtctagctgcgtctcgtccggggggtctgcgtccacggtaaagaccccgggcagcaggcgcgcgtcgaagtagtctatcttgcatccttgcaagtctagcgcctgctgccatgcgcgggcggcaagcgcgcgctcgtatgggttgagtgggggaccccatggcatggggtgggtgagcgcggaggcgtacatgccgcaaatgtcgtaaacgtagaggggctctctgagtattccaagatatgtagggtagcatcttccaccgcggatgctggcgcgcacgtaatcgtatagttcgtgcgagggagcgaggaggtcgggaccgaggttgctacgggcgggctgctctgctcggaagactatctgcctgaagatggcatgtgagttggatgatatggttggacgctggaagacgttgaagctggcgtctgtgagacctaccgcgtcacgcacgaaggaggcgtaggagtcgcgcagcttgttgaccagctcggcggtgacctgcacgtctagggcgcagtagtccagggtttccttgatgatgtcatacttatcctgtcccttttttttccacagctcgcggttgaggacaaactcttcgcggtctttccagtactcttggatcggaaacccgtcggcctccgaacggtaagagcctagcatgtagaactggttgacggcctggtaggcgcagcatcccttttctacgggtagcgcgtatgcctgcgcggccttccggagcgaggtgtgggtgagcgcaaaggtgtccctgaccatgactttgaggtactggtatttgaagtcagtgtcgtcgcatccgccctgctcccagagcaaaaagtccgtgcgctttttggaacgcggatttggcagggcgaaggtgacatcgttgaagagtatctttcccgcgcgaggcataaagttgcgtgtgatgcggaagggtcccggcacctcggaacggttgttaattacctgggcggcgagcacgatctcgtcaaagccgttgatgttgtggcccacaatgtaaagttccaagaagcgcgggatgcccttgatggaaggcaattttttaagttcctcgtaggtgagctcttcaggggagctgagcccgtgctctgaaagggcccagtctgcaagatgagggttggaagcgacgaatgagctccacaggtcacgggccattagcatttgcaggtggtcgcgaaaggtcctaaactggcgacctatggccattttttctggggtgatgcagtagaaggtaagcgggtcttgttcccagcggtcccatccaaggttcgcggctaggtctcgcgcggcagtcactagaggctcatctccgccgaacttcatgaccagcatgaagggcacgagctgcttcccaaaggcccccatccaagtataggtctctacatcgtaggtgacaaagagacgctcggtgcgaggatgcgagccgatcgggaagaactggatctcccgccaccaattggaggagtggctattgatgtggtgaaagtagaagtccctgcgacgggccgaacactcgtgctggcttttgtaaaaacgtgcgcagtactggcagcggtgcacgggctgtacatcctgcacgaggttgacctgacgaccgcgcacaaggaagcagagtgggaatttgagcccctcgcctggcgggtttggctggtggtcttctacttcggctgcttgtccttgaccgtctggctgctcgaggggagttacggtggatcggaccaccacgccgcgcgagcccaaagtccagatgtccgcgcgcggcggtcggagcttgatgacaacatcgcgcagatgggagctgtccatggtctggagctcccgcggcgtcaggtcaggcgggagctcctgcaggtttacctcgcatagacgggtcagggcgcgggctagatccaggtgatacctaatttccaggggctggttggtggcggcgtcgatggcttgcaagaggccgcatccccgcggcgcgactacggtaccgcgcggcgggcggtgggccgcgggggtgtccttggatgatgcatctaaaagcggtgacgcgggcgagcccccggaggtagggggggctccggacccgccgggagagggggcaggggcacgtcggcgccgcgcgcgggcaggagctggtgctgcgcgcgtaggttgctggcgaacgcgacgacgcggcggttgatctcctgaatctggcgcctctgcgtgaagacgacgggcccggtgagcttgagcctgaaagagagttcgacagaatcaatttcggtgtcgttgacggcggcctggcgcaaaatctcctgcacgtctcctgagttgtcttgataggcgatctcggccatgaactgctcgatctcttcctcctggagatctccgcgtccggctcgctccacggtggcggcgaggtcgttggaaatgcgggccatgagctgcgagaaggcgttgaggcctccctcgttccagacgcggctgtagaccacgcccccttcggcatcgcgggcgcgcatgaccacctgcgcgagattgagctccacgtgccgggcgaagacggcgtagtttcgcaggcgctgaaagaggtagttgagggtggtggcggtgtgttctgccacgaagaagtacataacccagcgtcgcaacgtggattcgttgatatcccccaaggcctcaaggcgctccatggcctcgtagaagtccacggcgaagttgaaaaactgggagttgcgcgccgacacggttaactcctcctccagaagacggatgagctcggcgacagtgtcgcgcacctcgcgctcaaaggctacaggggcctcttcttcttcttcaatctcctcttccataagggcctccccttcttcttcttctggcggcggtgggggaggggggacacggcggcgacgacggcgcaccgggaggcggtcgacaaagcgctcgatcatctccccgcggcgacggcgcatggtctcggtgacggcgcggccgttctcgcgggggcgcagttggaagacgccgcccgtcatgtcccggttatgggttggcggggggctgccatgcggcagggatacggcgctaacgatgcatctcaacaattgttgtgtaggtactccgccgccgagggacctgagcgagtccgcatcgaccggatcggaaaacctctcgagaaaggcgtctaaccagtcacagtcgcaaggtaggctgagcaccgtggcgggcggcagcgggcggcggtcggggttgtttctggcggaggtgctgctgatgatgtaattaaagtaggcggtcttgagacggcggatggtcgacagaagcaccatgtccttgggtccggcctgctgaatgcgcaggcggtcggccatgccccaggcttcgttttgacatcggcgcaggtctttgtagtagtcttgcatgagcctttctaccggcacttcttcttctccttcctcttgtcctgcatctcttgcatctatcgctgcggcggcggcggagtttggccgtaggtggcgccctcttcctcccatgcgtgtgaccccgaagcccctcatcggctgaagcagggctaggtcggcgacaacgcgctcggctaatatggcctgctgcacctgcgtgagggtagactggaagtcatccatgtccacaaagcggtggtatgcgcccgtgttgatggtgtaagtgcagttggccataacggaccagttaacggtctggtgacccggctgcgagagctcggtgtacctgagacgcgagtaagccctcgagtcaaatacgtagtcgttgcaagtccgcaccaggtactggtatcccaccaaaaagtgcggcggcggctggcggtagaggggccagcgtagggtggccggggctccgggggcgagatcttccaacataaggcgatgatatccgtagatgtacctggacatccaggtgatgccggcggcggtggtggaggcgcgcggaaagtcgcggacgcggttccagatgttgcgcagcggcaaaaagtgctccatggtcgggacgctctggccggtcaggcgcgcgcaatcgttgacgctctagaccgtgcaaaaggagagcctgtaagcgggcactcttccgtggtctggtggataaattcgcaagggtatcatggcggacgaccggggttcgagccccgtatccggccgtccgccgtgatccatgcggttaccgcccgcgtgtcgaacccaggtgtgcgacgtcagacaacgggggagtgctccttttggcttccttccaggcgcggcggctgctgcgctagcttttttggccactggccgcgcgcagcgtaagcggttaggctggaaagcgaaagcattaagtggctcgctccctgtagccggagggttattttccaagggttgagtcgcgggacccccggttcgagtctcggaccggccggactgcggcgaacgggggtttgcctccccgtcatgcaagaccccgcttgcaaattcctccggaaacagggacgagccccttttttgcttttcccagatgcatccggtgctgcggcagatgcgcccccctcctcagcagcggcaagagcaagagcagcggcagacatgcagggcaccctcccctcctcctaccgcgtcaggaggggcgacatccgcggttgacgcggcagcagatggtgattacgaacccccgcggcgccgggcccggcactacctggacttggaggagggcgagggcctggcgcggctaggagcgccctctcctgagcggtacccaagggtgcagctgaagcgtgatacgcgtgaggcgtacgtgccgcggcagaacctgtttcgcgaccgcgagggagaggagcccgaggagatgcgggatcgaaagttccacgcagggcgcgagctgcggcatggcctgaatcgcgagcggttgctgcgcgaggaggactttgagcccgacgcgcgaaccgggattagtcccgcgcgcgcacacgtggcggccgccgacctggtaaccgcatacgagcagacggtgaaccaggagattaactttcaaaaaagctttaacaaccacgtgcgtacgcttgtggcgcgcgaggaggtggctataggactgatgcatctgtgggactttgtaagcgcgctggagcaaaacccaaatagcaagccgctcatggcgcagctgttccttatagtgcagcacagcagggacaacgaggcattcagggatgcgctgctaaacatagtagagcccgagggccgctggctgctcgatttgataaacatcctgcagagcatagtggtgcaggagcgcagcttgagcctggctgacaaggtggccgccatcaactattccatgcttagcctgggcaagttttacgcccgcaagatataccataccccttacgttcccatagacaaggaggtaaagatcgaggggttctacatgcgcatggcgctgaaggtgcttaccttgagcgacgacctgggcgtttatcgcaacgagcgcatccacaaggccgtgagcgtgagccggcggcgcgagctcagcgaccgcgagctgatgcacagcctgcaaagggccctggctggcacgggcagcggcgatagagaggccgagtcctactttgacgcgggcgctgacctgcgctgggccccaagccgacgcgccctggaggcagctggggccggacctgggctggcggtggcacccgcgcgcgctggcaacgtcggcggcgtggaggaatatgacgaggacgatgagtacgagccagaggacggcgagtactaagcggtgatgtttctgatcagatgatgcaagacgcaacggacccggcggtgcgggcggcgctgcagagccagccgtccggccttaactccacggacgactggcgccaggtcatggaccgcatcatgtcgctgactgcgcgcaatcctgacgcgttccggcagcagccgcaggccaaccggctctccgcaattctggaagcggtggtcccggcgcgcgcaaaccccacgcacgagaaggtgctggcgatcgtaaacgcgctggccgaaaacagggccatccggcccgacgaggccggcctggtctacgacgcgctgcttcagcgcgtggctcgttacaacagcggcaacgtgcagaccaacctggaccggctggtgggggatgtgcgcgaggccgtggcgcagcgtgagcgcgcgcagcagcagggcaacctgggctccatggttgcactaaacgccttcctgagtacacagcccgccaacgtgccgcggggacaggaggactacaccaactttgtgagcgcactgcggctaatggtgactgagacaccgcaaagtgaggtgtaccagtctgggccagactattttttccagaccagtagacaaggcctgcagaccgtaaacctgagccaggctttcaaaaacttgcaggggctgtggggggtgcgggctcccacaggcgaccgcgcgaccgtgtctagcttgctgacgcccaactcgcgcctgttgctgctgctaatagcgcccttcacggacagtggcagcgtgtcccgggacacatacctaggtcacttgctgacactgtaccgcgaggccataggtcaggcgcatgtggacgagcatactttccaggagattacaagtgtcagccgcgcgctggggcaggaggacacgggcagcctggaggcaaccctaaactacctgctgaccaaccggcggcagaagatcccctcgttgcacagtttaaacagcgaggaggagcgcattttgcgctacgtgcagcagagcgtgagccttaacctgatgcgcgacggggtaacgcccagcgtggcgctggacatgaccgcgcgcaacatggaaccgggcatgtatgcctcaaaccggccgtttatcaaccgcctaatggactacttgcatcgcgcggccgccgtgaaccccgagtatttcaccaatgccatcttgaacccgcactggctaccgccccctggtttctacaccgggggattcgaggtgcccgagggtaacgatggattcctctgggacgacatagacgacagcgtgttttccccgcaaccgcagaccctgctagagttgcaacagcgcgagcaggcagaggcggcgctgcgaaaggaaagcttccgcaggccaagcagcttgtccgatctaggcgctgcggccccgcggtcagatgctagtagcccatttccaagcttgatagggtctcttaccagcactcgcaccacccgcccgcgcctgctgggcgaggaggagtacctaaacaactcgctgctgcagccgcagcgcgaaaaaaacctgcctccggcatttcccaacaacgggatagagagcctagtggacaagatgagtagatggaagacgtacgcgcaggagcacagggacgtgccaggcccgcgcccgcccacccgtcgtcaaaggcacgaccgtcagcggggtctggtgtgggaggacgatgactcggcagacgacagcagcgtcctggatttgggagggagtggcaacccgtttgcgcaccttcgccccaggctggggagaatgttttaaaaaaaaaaaagcatgatgcaaaataaaaaactcaccaaggccatggcaccgagcgttggttttcttgtattccccttagtatgcggcgcgcggcgatgtatgaggaaggtcctcctccctcctacgagagtgtggtgagcgcggcgccagtggcggcggcgctgggttctcccttcgatgctcccctggacccgccgtttgtgcctccgcggtacctgcggcctaccggggggagaaacagcatccgttactctgagttggcacccctattcgacaccacccgtgtgtacctggtggacaacaagtcaacggatgtggcatccctgaactaccagaacgaccacagcaactttctgaccacggtcattcaaaacaatgactacagcccgggggaggcaagcacacagaccatcaatcttgacgaccggtcgcactggggcggcgacctgaaaaccatcctgcataccaacatgccaaatgtgaacgagttcatgtttaccaataagtttaaggcgcgggtgatggtgtcgcgcttgcctactaaggacaatcaggtggagctgaaatacgagtgggtggagttcacgctgcccgagggcaactactccgagaccatgaccatagaccttatgaacaacgcgatcgtggagcactacttgaaagtgggcagacagaacggggttctggaaagcgacatcggggtaaagtttgacacccgcaacttcagactggggtttgaccccgtcactggtcttgtcatgcctggggtatatacaaacgaagccttccatccagacatcattttgctgccaggatgcggggtggacttcacccacagccgcctgagcaacttgttgggcatccgcaagcggcaacccttccaggagggctttaggatcacctacgatgatctggagggtggtaacattcccgcactgttggatgtggacgcctaccaggcgagcttgaaagatgacaccgaacagggcgggggtggcgcaggcggcagcaacagcagtggcagcggcgcggaagagaactccaacgcggcagccgcggcaatgcagccggtggaggacatgaacgatcatgccattcgcggcgacacctttgccacacgggctgaggagaagcgcgctgaggccgaagcagcggccgaagctgccgcccccgctgcgcaacccgaggtcgagaagcctcagaagaaaccggtgatcaaacccctgacagaggacagcaagaaacgcagttacaacctaataagcaatgacagcaccttcacccagtaccgcagctggtaccttgcatacaactacggcgaccctcagaccggaatccgctcatggaccctgctttgcactcctgacgtaacctgcggctcggagcaggtctactggtcgttgccagacatgatgcaagaccccgtgaccttccgctccacgcgccagatcagcaactttccggtggtgggcgccgagctgttgcccgtgcactccaagagcttctacaacgaccaggccgtctactcccaactcatccgccagtttacctctctgacccacgtgttcaatcgctttcccgagaaccagattttggcgcgcccgccagcccccaccatcaccaccgtcagtgaaaacgttcctgctctcacagatcacgggacgctaccgctgcgcaacagcatcggaggagtccagcgagtgaccattactgacgccagacgccgcacctgcccctacgtttacaaggccctgggcatagtctcgccgcgcgtcctatcgagccgcactttttgagcaagcatgtccatccttatatcgcccagcaataacacaggctggggcctgcgcttcccaagcaagatgtttggcggggccaagaagcgctccgaccaacacccagtgcgcgtgcgcgggcactaccgcgcgccctggggcgcgcacaaacgcggccgcactgggcgcaccaccgtcgatgacgccatcgacgcggtggtggaggaggcgcgcaactacacgcccacgccgccaccagtgtccacagtggacgcggccattcagaccgtggtgcgcggagcccggcgctatgctaaaatgaagagacggcggaggcgcgtagcacgtcgccaccgccgccgacccggcactgccgcccaacgcgcggcggcggccctgcttaaccgcgcacgtcgcaccggccgacgggcggccatgcgggccgctcgaaggctggccgcgggtattgtcactgtgccccccaggtccaggcgacgagcggccgccgcagcagccgcggccattagtgctatgactcagggtcgcaggggcaacgtgtattgggtgcgcgactcggttagcggcctgcgcgtgcccgtgcgcacccgccccccgcgcaactagattgcaagaaaaaactacttagactcgtactgttgtatgtatccagcggcggcggcgcgcaacgaagctatgtccaagcgcaaaatcaaagaagagatgctccaggtcatcgcgccggagatctatggccccccgaagaaggaagagcaggattacaagccccgaaagctaaagcgggtcaaaaagaaaaagaaagatgatgatgatgaacttgacgacgaggtggaactgctgcacgctaccgcgcccaggcgacgggtacagtggaaaggtcgacgcgtaaaacgtgttttgcgacccggcaccaccgtagtctttacgcccggtgagcgctccacccgcacctacaagcgcgtgtatgatgaggtgtacggcgacgaggacctgcttgagcaggccaacgagcgcctcggggagtttgcctacggaaagcggcataaggacatgctggcgttgccgctggacgagggcaacccaacacctagcctaaagcccgtaacactgcagcaggtgctgcccgcgcttgcaccgtccgaagaaaagcgcggcctaaagcgcgagtctggtgacttggcacccaccgtgcagctgatggtacccaagcgccagcgactggaagatgtcttggaaaaaatgaccgtggaacctgggctggagcccgaggtccgcgtgcggccaatcaagcaggtggcgccgggactgggcgtgcagaccgtggacgttcagatacccactaccagtagcaccagtattgccaccgccacagagggcatggagacacaaacgtccccggttgcctcagcggtggcggatgccgcggtgcaggcggtcgctgcggccgcgtccaagacctctacggaggtgcaaacggacccgtggatgtttcgcgtttcagccccccggcgcccgcgcggttcgaggaagtacggcgccgccagcgcgctactgcccgaatatgccctacatccttccattgcgcctacccccggctatcgtggctacacctaccgccccagaagacgagcaactacccgacgccgaaccaccactggaacccgccgccgccgtcgccgtcgccagcccgtgctggccccgatttccgtgcgcagggtggctcgcgaaggaggcaggaccctggtgctgccaacagcgcgctaccaccccagcatcgtttaaaagccggtctttgtggttcttgcagatatggccctcacctgccgcctccgtttcccggtgccgggattccgaggaagaatgcaccgtaggaggggcatggccggccacggcctgacgggcggcatgcgtcgtgcgcaccaccggcggcggcgcgcgtcgcaccgtcgcatgcgcggcggtatcctgcccctccttattccactgatcgccgcggcgattggcgccgtgcccggaattgcatccgtggccttgcaggcgcagagacactgattaaaaacaagttgcatgtggaaaaatcaaaataaaaagtctggactctcacgctcgcttggtcctgtaactattttgtagaatggaagacatcaactttgcgtctctggccccgcgacacggctcgcgcccgttcatgggaaactggcaagatatcggcaccagcaatatgagcggtggcgccttcagctggggctcgctgtggagcggcattaaaaatttcggttccaccgttaagaactatggcagcaaggcctggaacagcagcacaggccagatgctgagggataagttgaaagagcaaaatttccaacaaaaggtggtagatggcctggcctctggcattagcggggtggtggacctggccaaccaggcagtgcaaaataagattaacagtaagcttgatccccgccctcccgtagaggagcctccaccggccgtggagacagtgtctccagaggggcgtggcgaaaagcgtccgcgccccgacagggaagaaactctggtgacgcaaatagacgagcctccctcgtacgaggaggcactaaagcaaggcctgcccaccacccgtcccatcgcgcccatggctaccggagtgctgggccagcacacacccgtaacgctggacctgcctccccccgccgacacccagcagaaacctgtgctgccaggcccgaccgccgttgttgtaacccgtcctagccgcgcgtccctgcgccgcgccgccagcggtccgcgatcgttgcggcccgtagccagtggcaactggcaaagcacactgaacagcatcgtgggtctgggggtgcaatccctgaagcgccgacgatgcttctgaatagctaacgtgtcgtatgtgtgtcatgtatgcgtccatgtcgccgccagaggagctgctgagccgccgcgcgcccgctttccaagatggctaccccttcgatgatgccgcagtggtcttacatgcacatctcgggccaggacgcctcggagtacctgagccccgggctggtgcagtttgcccgcgccaccgagacgtacttcagcctgaataacaagtttagaaaccccacggtggcgcctacgcacgacgtgaccacagaccggtcccagcgtttgacgctgcggttcatccctgtggaccgtgaggatactgcgtactcgtacaaggcgcggttcaccctagctgtgggtgataaccgtgtgctggacatggcttccacgtactttgacatccgcggcgtgctggacaggggccctacttttaagccctactctggcactgcctacaacgccctggctcccaagggtgccccaaatccttgcgaatgggatgaagctgctactgctcttgaaataaacctagaagaagaggacgatgacaacgaagacgaagtagacgagcaagctgagcagcaaaaaactcacgtatttgggcaggcgccttattctggtataaatattacaaaggagggtattcaaataggtgtcgaaggtcaaacacctaaatatgccgataaaacatttcaacctgaacctcaaataggagaatctcagtggtacgaaactgaaattaatcatgcagctgggagagtccttaaaaagactaccccaatgaaaccatgttacggttcatatgcaaaacccacaaatgaaaatggagggcaaggcattcttgtaaagcaacaaaatggaaagctagaaagtcaagtggaaatgcaatttttctcaactactgaggcgaccgcaggcaatggtgataacttgactcctaaagtggtattgtacagtgaagatgtagatatagaaaccccagacactcatatttcttacatgcccactattaaggaaggtaactcacgagaactaatgggccaacaatctatgcccaacaggcctaattacattgcttttagggacaattttattggtctaatgtattacaacagcacgggtaatatgggtgttctggcgggccaagcatcgcagttgaatgctgttgtagatttgcaagacagaaacacagagctttcataccagcttttgcttgattccattggtgatagaaccaggtacttttctatgtggaatcaggctgttgacagctatgatccagatgttagaattattgaaaatcatggaactgaagatgaacttccaaattactgctttccactgggaggtgtgattaatacagagactcttaccaaggtaaaacctaaaacaggtcaggaaaatggatgggaaaaagatgctacagaattttcagataaaaatgaaataagagttggaaataattttgccatggaaatcaatctaaatgccaacctgtggagaaatttcctgtactccaacatagcgctgtatttgcccgacaagctaaagtacagtccttccaacgtaaaaatttctgataacccaaacacctacgactacatgaacaagcgagtggtggctcccgggttagtggactgctacattaaccttggagcacgctggtcccttgactatatggacaacgtcaacccatttaaccaccaccgcaatgctggcctgcgctaccgctcaatgttgctgggcaatggtcgctatgtgcccttccacatccaggtgcctcagaagttctttgccattaaaaacctccttctcctgccgggctcatacacctacgagtggaacttcaggaaggatgttaacatggttctgcagagctccctaggaaatgacctaagggttgacggagccagcattaagtttgatagcatttgcctttacgccaccttcttccccatggcccacaacaccgcctccacgcttgaggccatgcttagaaacgacaccaacgaccagtcctttaacgactatctctccgccgccaacatgctctaccctatacccgccaacgctaccaacgtgcccatatccatcccctcccgcaactgggcggctttccgcggctgggccttcacgcgccttaagactaaggaaaccccatcactgggctcgggctacgacccttattacacctactctggctctataccctacctagatggaaccttttacctcaaccacacctttaagaaggtggccattacctttgactcttctgtcagctggcctggcaatgaccgcctgcttacccccaacgagtttgaaattaagcgctcagttgacggggagggttacaacgttgcccagtgtaacatgaccaaagactggttcctggtacaaatgctagctaactacaacattggctaccagggcttctatatcccagagagctacaaggaccgcatgtactccttctttagaaacttccagcccatgagccgtcaggtggtggatgatactaaatacaaggactaccaacaggtgggcatcctacaccaacacaacaactctggatttgttggctaccttgcccccaccatgcgcgaaggacaggcctaccctgctaacttcccctatccgcttataggcaagaccgcagttgacagcattacccagaaaaagtttctttgcgatcgcaccctttggcgcatcccattctccagtaactttatgtccatgggcgcactcacagacctgggccaaaaccttctctacgccaactccgcccacgcgctagacatgacttttgaggtggatcccatggacgagcccacccttctttatgttttgtttgaagtctttgacgtggtccgtgtgcaccggccgcaccgcggcgtcatcgaaaccgtgtacctgcgcacgcccttctcggccggcaacgccacaacataaagaagcaagcaacatcaacaacagctgccgccatgggctccagtgagcaggaactgaaagccattgtcaaagatcttggttgtgggccatattttttgggcacctatgacaagcgctttccaggctttgtttctccacacaagctcgcctgcgccatagtcaatacggccggtcgcgagactgggggcgtacactggatggcctttgcctggaacccgcactcaaaaacatgctacctctttgagccctttggcttttctgaccagcgactcaagcaggtttaccagtttgagtacgagtcactcctgcgccgtagcgccattgcttcttcccccgaccgctgtataacgctggaaaagtccacccaaagcgtacaggggcccaactcggccgcctgtggactattctgctgcatgtttctccacgcctttgccaactggccccaaactcccatggatcacaaccccaccatgaaccttattaccggggtacccaactccatgctcaacagtccccaggtacagcccaccctgcgtcgcaaccaggaacagctctacagcttcctggagcgccactcgccctacttccgcagccacagtgcgcagattaggagcgccacttctttttgtcacttgaaaaacatgtaaaaataatgtactagagacactttcaataaaggcaaatgcttttatttgtacactctcgggtgattatttacccccacccttgccgtctgcgccgtttaaaaatcaaaggggttctgccgcgcatcgctatgcgccactggcagggacacgttgcgatactggtgtttagtgctccacttaaactcaggcacaaccatccgcggcagctcggtgaagttttcactccacaggctgcgcaccatcaccaacgcgtttagcaggtcgggcgccgatatcttgaagtcgcagttggggcctccgccctgcgcgcgcgagttgcgatacacagggttgcagcactggaacactatcagcgccgggtggtgcacgctggccagcacgctcttgtcggagatcagatccgcgtccaggtcctccgcgttgctcagggcgaacggagtcaactttggtagctgccttcccaaaaagggcgcgtgcccaggctttgagttgcactcgcaccgtagtggcatcaaaaggtgaccgtgcccggtctgggcgttaggatacagcgcctgcataaaagccttgatctgcttaaaagccacctgagcctttgcgccttcagagaagaacatgccgcaagacttgccggaaaactgattggccggacaggccgcgtcgtgcacgcagcaccttgcgtcggtgttggagatctgcaccacatttcggccccaccggttcttcacgatcttggccttgctagactgctccttcagcgcgcgctgcccgttttcgctcgtcacatccatttcaatcacgtgctccttatttatcataatgcttccgtgtagacacttaagctcgccttcgatctcagcgcagcggtgcagccacaacgcgcagcccgtgggctcgtgatgcttgtaggtcacctctgcaaacgactgcaggtacgcctgcaggaatcgccccatcatcgtcacaaaggtcttgttgctggtgaaggtcagctgcaacccgcggtgctcctcgttcagccaggtcttgcatacggccgccagagcttccacttggtcaggcagtagtttgaagttcgcctttagatcgttatccacgtggtacttgtccatcagcgcgcgcgcagcctccatgcccttctcccacgcagacacgatcggcacactcagcgggttcatcaccgtaatttcactttccgcttcgctgggctcttcctcttcctcttgcgtccgcataccacgcgccactgggtcgtcttcattcagccgccgcactgtgcgcttacctcctttgccatgcttgattagcaccggtgggttgctgaaacccaccatttgtagcgccacatcttctctttcttcctcgctgtccacgattacctctggtgatggcgggcgctcgggcttgggagaagggcgcttctttttcttcttgggcgcaatggccaaatccgccgccgaggtcgatggccgcgggctgggtgtgcgcggcaccagcgcgtcttgtgatgagtcttcctcgtcctcggactcgatacgccgcctcatccgcttttttgggggcgcccggggaggcggcggcgacggggacggggacgacacgtcctccatggttgggggacgtcgcgccgcaccgcgtccgcgctcgggggtggtttcgcgctgctcctcttcccgactggccatttccttctcctataggcagaaaaagatcatggagtcagtcgagaagaaggacagcctaaccgccccctctgagttcgccaccaccgcctccaccgatgccgccaacgcgcctaccaccttccccgtcgaggcacccccgcttgaggaggaggaagtgattatcgagcaggacccaggttttgtaagcgaagacgacgaggaccgctcagtaccaacagaggataaaaagcaagaccaggacaacgcagaggcaaacgaggaacaagtcgggcggggggacgaaaggcatggcgactacctagatgtgggagacgacgtgctgttgaagcatctgcagcgccagtgcgccattatctgcgacgcgttgcaagagcgcagcgatgtgcccctcgccatagcggatgtcagccttgcctacgaacgccacctattctcaccgcgcgtaccccccaaacgccaagaaaacggcacatgcgagcccaacccgcgcctcaacttctaccccgtatttgccgtgccagaggtgcttgccacctatcacatctttttccaaaactgcaagatacccctatcctgccgtgccaaccgcagccgagcggacaagcagctggccttgcggcagggcgctgtcatacctgatatcgcctcgctcaacgaagtgccaaaaatctttgagggtcttggacgcgacgagaagcgcgcggcaaacgctctgcaacaggaaaacagcgaaaatgaaagtcactctggagtgttggtggaactcgagggtgacaacgcgcgcctagccgtactaaaacgcagcatcgaggtcacccactttgcctacccggcacttaacctaccccccaaggtcatgagcacagtcatgagtgagctgatcgtgcgccgtgcgcagcccctggagagggatgcaaatttgcaagaacaaacagaggagggcctacccgcagttggcgacgagcagctagcgcgctggcttcaaacgcgcgagcctgccgacttggaggagcgacgcaaactaatgatggccgcagtgctcgttaccgtggagcttgagtgcatgcagcggttctttgctgacccggagatgcagcgcaagctagaggaaacattgcactacacctttcgacagggctacgtacgccaggcctgcaagatctccaacgtggagctctgcaacctggtctcctaccttggaattttgcacgaaaaccgccttgggcaaaacgtgcttcattccacgctcaagggcgaggcgcgccgcgactacgtccgcgactgcgtttacttatttctatgctacacctggcagacggccatgggcgtttggcagcagtgcttggaggagtgcaacctcaaggagctgcagaaactgctaaagcaaaacttgaaggacctatggacggccttcaacgagcgctccgtggccgcgcacctggcggacatcattttccccgaacgcctgcttaaaaccctgcaacagggtctgccagacttcaccagtcaaagcatgttgcagaactttaggaactttatcctagagcgctcaggaatcttgcccgccacctgctgtgcacttcctagcgactttgtgcccattaagtaccgcgaatgccctccgccgctttggggccactgctaccttctgcagctagccaactaccttgcctaccactctgacataatggaagacgtgagcggtgacggtctactggagtgtcactgtcgctgcaacctatgcaccccgcaccgctccctggtttgcaattcgcagctgcttaacgaaagtcaaattatcggtacctttgagctgcagggtccctcgcctgacgaaaagtccgcggctccggggttgaaactcactccggggctgtggacgtcggcttaccttcgcaaatttgtacctgaggactaccacgcccacgagattaggttctacgaagaccaatcccgcccgccaaatgcggagcttaccgcctgcgtcattacccagggccacattcttggccaattgcaagccatcaacaaagcccgccaagagtttctgctacgaaagggacggggggtttacttggacccccagtccggcgaggagctcaacccaatccccccgccgccgcagccctatcagcagcagccgcgggcccttgcttcccaggatggcacccaaaaagaagctgcagctgccgccgccacccacggacgaggaggaatactgggacagtcaggcagaggaggttttggacgaggaggaggaggacatgatggaagactgggagagcctagacgaggaagcttccgaggtcgaagaggtgtcagacgaaacaccgtcaccctcggtcgcattcccctcgccggcgccccagaaatcggcaaccggttccagcatggctacaacctccgctcctcaggcgccgccggcactgcccgttcgccgacccaaccgtagatgggacaccactggaaccagggccggtaagtccaagcagccgccgccgttagcccaagagcaacaacagcgccaaggctaccgctcatggcgcgggcacaagaacgccatagttgcttgcttgcaagactgtgggggcaacatctccttcgcccgccgctttcttctctaccatcacggcgtggccttcccccgtaacatcctgcattactaccgtcatctctacagcccatactgcaccggcggcagcggcagcggcagcaacagcagcggccacacagaagcaaaggcgaccggatagcaagactctgacaaagcccaagaaatccacagcggcggcagcagcaggaggaggagcgctgcgtctggcgcccaacgaacccgtatcgacccgcgagcttagaaacaggatttttcccactctgtatgctatatttcaacagagcaggggccaagaacaagagctgaaaataaaaaacaggtctctgcgatccctcacccgcagctgcctgtatcacaaaagcgaagatcagcttcggcgcacgctggaagacgcggaggctctcttcagtaaatactgcgcgctgactcttaaggactagtttcgcgccctttctcaaatttaagcgcgaaaactacgtcatctccagcggccacacccggcgccagcacctgtcgtcagcgccattatgagcaaggaaattcccacgccctacatgtggagttaccagccacaaatgggacttgcggctggagctgcccaagactactcaacccgaataaactacatgagcgcgggaccccacatgatatcccgggtcaacggaatccgcgcccaccgaaaccgaattctcttggaacaggcggctattaccaccacacctcgtaataaccttaatccccgtagttggcccgctgccctggtgtaccaggaaagtcccgctcccaccactgtggtacttcccagagacgcccaggccgaagttcagatgactaactcaggggcgcagcttgcgggcggctttcgtcacagggtgcggtcgcccgggcagggtataactcacctgacaatcagagggcgaggtattcagctcaacgacgagtcggtgagctcctcgcttggtctccgtccggacgggacatttcagatcggcggcgccggccgtccttcattcacgcctcgtcaggcaatcctaactctgcagacctcgtcctctgagccgcgctctggaggcattggaactctgcaatttattgaggagtttgtgccatcggtctactttaaccccttctcgggacctcccggccactatccggatcaatttattcctaactttgacgcggtaaaggactcggcggacggctacgactgaatgttaagtggagaggcagagcaactgcgcctgaaacacctggtccactgtcgccgccacaagtgctttgcccgcgactccggtgagttttgctactttgaattgcccgaggatcatatcgagggcccggcgcacggcgtccggcttaccgcccagggagagcttgcccgtagcctgattcgggagtttacccagcgccccctgctagttgagcgggacaggggaccctgtgttctcactgtgatttgcaactgtcctaaccttggattacatcaagatctttgttgccatctctgtgctgagtataataaatacagaaattaaaatatactggggctcctatcgccatcctgtaaacgccaccgtcttcacccgcccaagcaaaccaaggcgaaccttacctggtacttttaacatctctccctctgtgatttacaacagtttcaacccagacggagtgagtctacgagagaacctctccgagctcagctactccatcagaaaaaacaccaccctccttacctgccgggaacgtacgagtgcgtcaccggccgctgcaccacacctaccgcctgaccgtaaaccagactttttccggacagacctcaataactctgtttaccagaacaggaggtgagcttagaaaacccttagggtattaggccaaaggcgcagctactgtggggtttatgaacaattcaagcaactctacgggctattctaattcaggtttctctagaaatggacggaattattacagagcagcgcctgctagaaagacgcagggcagcggccgagcaacagcgcatgaatcaagagctccaagacatggttaacttgcaccagtgcaaaaggggtatcttttgtctggtaaagcaggccaaagtcacctacgacagtaataccaccggacaccgccttagctacaagttgccaaccaagcgtcagaaattggtggtcatggtgggagaaaagcccattaccataactcagcactcggtagaaaccgaaggctgcattcactcaccttgtcaaggacctgaggatctctgcacccttattaagaccctgtgcggtctcaaagatcttattccctttaactaataaaaaaaaataataaagcatcacttacttaaaatcagttagcaaatttctgtccagtttattcagcagcacctccttgccctcctcccagctctggtattgcagcttcctcctggctgcaaactttctccacaatctaaatggaatgtcagtttcctcctgttcctgtccatccgcacccactatcttcatgttgttgcagatgaagcgcgcaagaccgtctgaagataccttcaaccccgtgtatccatatgacacggaaaccggtcctccaactgtgccttttcttactcctccctttgtatcccccaatgggtttcaagagagtccccctggggtactctctttgcgcctatccgaacctctagttacctccaatggcatgcttgcgctcaaaatgggcaacggcctctctctggacgaggccggcaaccttacctcccaaaatgtaaccactgtgagcccacctctcaaaaaaaccaagtcaaacataaacctggaaatatctgcacccctcacagttacctcagaagccctaactgtggctgccgccgcacctctaatggtcgcgggcaacacactcaccatgcaatcacaggccccgctaaccgtgcacgactccaaacttagcattgccacccaaggacccctcacagtgtcagaaggaaagctagccctgcaaacatcaggccccctcaccaccaccgatagcagtacccttactatcactgcctcaccccctctaactactgccactggtagcttgggcattgacttgaaagagcccatttatacacaaaatggaaaactaggactaaagtacggggctcctttgcatgtaacagacgacctaaacactttgaccgtagcaactggtccaggtgtgactattaataatacttccttgcaaactaaagttactggagccttgggttttgattcacaaggcaatatgcaacttaatgtagcaggaggactaaggattgattctcaaaacagacgccttatacttgatgttagttatccgtttgatgctcaaaaccaactaaatctaagactaggacagggccctctttttataaactcagcccacaacttggatattaactacaacaaaggcctttacttgtttacagcttcaaacaattccaaaaagcttgaggttaacctaagcactgccaaggggttgatgtttgacgctacagccatagccattaatgcaggagatgggcttgaatttggttcacctaatgcaccaaacacaaatcccctcaaaacaaaaattggccatggcctagaatttgattcaaacaaggctatggttcctaaactaggaactggccttagttttgacagcacaggtgccattacagtaggaaacaaaaataatgataagctaactttgtggaccacaccagctccatctcctaactgtagactaaatgcagagaaagatgctaaactcactttggtcttaacaaaatgtggcagtcaaatacttgctacagtttcagttttggctgttaaaggcagtttggctccaatatctggaacagttcaaagtgctcatcttattataagatttgacgaaaatggagtgctactaaacaattccttcctggacccagaatattggaactttagaaatggagatcttactgaaggcacagcctatacaaacgctgttggatttatgcctaacctatcagcttatccaaaatctcacggtaaaactgccaaaagtaacattgtcagtcaagtttacttaaacggagacaaaactaaacctgtaacactaaccattacactaaacggtacacaggaaacaggagacacaactccaagtgcatactctatgtcattttcatgggactggtctggccacaactacattaatgaaatatttgccacatcctcttacactttttcatacattgcccaagaataaagaatcgtttgtgttatgtttcaacgtgtttatttttcaattgcagaaaatttcgaatcatttttcattcagtagtatagccccaccaccacatagcttatacagatcaccgtaccttaatcaaactcacagaaccctagtattcaacctgccacctccctcccaacacacagagtacacagtcctttctccccggctggccttaaaaagcatcatatcatgggtaacagacatattcttaggtgttatattccacacggtttcctgtcgagccaaacgctcatcagtgatattaataaactccccgggcagctcacttaagttcatgtcgctgtccagctgctgagccacaggctgctgtccaacttgcggttgcttaacgggcggcgaaggagaagtccacgcctacatgggggtagagtcataatcgtgcatcaggatagggcggtggtgctgcagcagcgcgcgaataaactgctgccgccgccgctccgtcctgcaggaatacaacatggcagtggtctcctcagcgatgattcgcaccgcccgcagcataaggcgccttgtcctccgggcacagcagcgcaccctgatctcacttaaatcagcacagtaactgcagcacagcaccacaatattgttcaaaatcccacagtgcaaggcgctgtatccaaagctcatggcggggaccacagaacccacgtggccatcataccacaagcgcaggtagattaagtggcgacccctcataaacacgctggacataaacattacctcttttggcatgttgtaattcaccacctcccggtaccatataaacctctgattaaacatggcgccatccaccaccatcctaaaccagctggccaaaacctgcccgccggctatacactgcagggaaccgggactggaacaatgacagtggagagcccaggactcgtaaccatggatcatcatgctcgtcatgatatcaatgttggcacaacacaggcacacgtgcatacacttcctcaggattacaagctcctcccgcgttagaaccatatcccagggaacaacccattcctgaatcagcgtaaatcccacactgcagggaagacctcgcacgtaactcacgttgtgcattgtcaaagtgttacattcgggcagcagcggatgatcctccagtatggtagcgcgggtttctgtctcaaaaggaggtagacgatccctactgtacggagtgcgccgagacaaccgagatcgtgttggtcgtagtgtcatgccaaatggaacgccggacgtagtcatatttcctgaagcaaaaccaggtgcgggcgtgacaaacagatctgcgtctccggtctcgccgcttagatcgctctgtgtagtagttgtagtatatccactctctcaaagcatccaggcgccccctggcttcgggttctatgtaaactccttcatgcgccgctgccctgataacatccaccaccgcagaataagccacacccagccaacctacacattcgttctgcgagtcacacacgggaggagcgggaagagctggaagaaccatgtttttttttttattccaaaagattatccaaaacctcaaaatgaagatctattaagtgaacgcgctcccctccggtggcgtggtcaaactctacagccaaagaacagataatggcatttgtaagatgttgcacaatggcttccaaaaggcaaacggccctcacgtccaagtggacgtaaaggctaaacccttcagggtgaatctcctctataaacattccagcaccttcaaccatgcccaaataattctcatctcgccaccttctcaatatatctctaagcaaatcccgaatattaagtccggccattgtaaaaatctgctccagagcgccctccaccttcagcctcaagcagcgaatcatgattgcaaaaattcaggttcctcacagacctgtataagattcaaaagcggaacattaacaaaaataccgcgatcccgtaggtcccttcgcagggccagctgaacataatcgtgcaggtctgcacggaccagcgcggccacttccccgccaggaaccttgacaaaagaacccacactgattatgacacgcatactcggagctatgctaaccagcgtagccccgatgtaagctttgttgcatgggcggcgatataaaatgcaaggtgctgctcaaaaaatcaggcaaagcctcgcgcaaaaaagaaagcacatcgtagtcatgctcatgcagataaaggcaggtaagctccggaaccaccacagaaaaagacaccatttttctctcaaacatgtctgcgggtttctgcataaacacaaaataaaataacaaaaaaacatttaaacattagaagcctgtcttacaacaggaaaaacaacccttataagcataagacggactacggccatgccggcgtgaccgtaaaaaaactggtcaccgtgattaaaaagcaccaccgacagctcctcggtcatgtccggagtcataatgtaagactcggtaaacacatcaggttgattcacatcggtcagtgctaaaaagcgaccgaaatagcccgggggaatacatacccgcaggcgtagagacaacattacagcccccataggaggtataacaaaattaataggagagaaaaacacataaacacctgaaaaaccctcctgcctaggcaaaatagcaccctcccgctccagaacaacatacagcgcttccacagcggcagccataacagtcagccttaccagtaaaaaagaaaacctattaaaaaaacaccactcgacacggcaccagctcaatcagtcacagtgtaaaaaagggccaagtgcagagcgagtatatataggactaaaaaatgacgtaacggttaaagtccacaaaaaacacccagaaaaccgcacgcgaacctacgcccagaaacgaaagccaaaaaacccacaacttcctcaaatcgtcacttccgttttcccacgttacgtcacttcccattttaagaaaactacaattcccaacacatacaagttactccgccctaaaacctacgtcacccgccccgttcccacgccccgcgccacgtcacaaactccaccccctcattatcatattggcttcaatccaaaataaggtatattattgatgatgttaattaatttaaatccgcatgcgatatcgagctctcccgggaattcggatctgcgacgcgaggctggatggccttccccattatgattcttctcgcttccggcggcatcgggatgcccgcgttgcaggccatgctgtccaggcaggtagatgacgaccatcagggacagcttcacggccagcaaaaggccaggaaccgtaaaaaggccgcgttgctggcgtttttccataggctccgcccccctgacgagcatcacaaaaatcgacgctcaagtcagaggtggcgaaacccgacaggactataaagataccaggcgtttccccctggaagctccctcgtgcgctctcctgttccgaccctgccgcttaccggatacctgtccgcctttctcccttcgggaagcgtggcgctttctcaatgctcacgctgtaggtatctcagttcggtgtaggtcgttcgctccaagctgggctgtgtgcacgaaccccccgttcagcccgaccgctgcgccttatccggtaactatcgtcttgagtccaacccggtaagacacgacttatcgccactggcagcagccactggtaacaggattagcagagcgaggtatgtaggcggtgctacagagttcttgaagtggtggcctaactacggctacactagaaggacagtatttggtatctgcgctctgctgaagccagttaccttcggaaaaagagttggtagctcttgatccggcaaacaaaccaccgctggtagcggtggtttttttgtttgcaagcagcagattacgcgcagaaaaaaaggatctcaagaagatcctttgatcttttctacggggtctgacgctcagtggaacgaaaactcacgttaagggattttggtcatgagattatcaaaaaggatcttcacctagatccttttaaatcaatctaaagtatatatgagtaaacttggtctgacagttaccaatgcttaatcagtgaggcacctatctcagcgatctgtctatttcgttcatccatagttgcctgactccccgtcgtgtagataactacgatacgggagggcttaccatctggccccagtgctgcaatgataccgcgagacccacgctcaccggctccagatttatcagcaataaaccagccagccggaagggccgagcgcagaagtggtcctgcaactttatccgcctccatccagtctattaattgttgccgggaagctagagtaagtagttcgccagttaatagtttgcgcaacgttgttgccattgctgcaggcatcgtggtgtcacgctcgtcgtttggtatggcttcattcagctccggttcccaacgatcaaggcgagttacatgatcccccatgttgtgcaaaaaagcggttagctccttcggtcctccgatcgttgtcagaagtaagttggccgcagtgttatcactcatggttatggcagcactgcataattctcttactgtcatgccatccgtaagatgcttttctgtgactggtgagtactcaaccaagtcattctgagaatagtgtatgcggcgaccgagttgctcttgcccggcgtcaacacgggataataccgcgccacatagcagaactttaaaagtgctcatcattggaaaacgttcttcggggcgaaaactctcaaggatcttaccgctgttgagatccagttcgatgtaacccactcgtgcacccaactgatcttcagcatcttttactttcaccagcgtttctgggtgagcaaaaacaggaaggcaaaatgccgcaaaaaagggaataagggcgacacggaaatgttgaatactcatactcttcctttttcaatattattgaagcatttatcagggttattgtctcatgagcggatacatatttgaatgtatttagaaaaataaacaaataggggttccgcgcacatttccccgaaaagtgccacctgacgtctaagaaaccattattatcatgacattaacctataaaaataggcgtatcacgaggccctttcgtcttcaaggatccgaattcccgggagagctcgatatcgcatgcggatttaaattaattaa

SEQ ID NO: 86 - protein, 257 aa, Artificial Sequence
  s4-1BBL construct
MPMGSLQPLATLYLLGMLVASCLGGSGSNWSHPQFEKGGSGGHHHHHHGGSGGTRACGCAAAPDIKDLLSRLEELEGLVSSLREQGSLDLRQGMFAQLVAQNVLLIDGPLSWYSDPGLAGVSLTGGLSYKEDTKELVVAKAGVYYVFFQLELRRVVAGEGSGSVSLALHLQPLRSAAGAAALALTVDLPPASSEARNSAFGFQGRLLHLSAGQRLGVHLHTEARARHAWQLTQGATVLGLFRVTPEIPAGLPSPRSE

SEQ ID NO: 87 - protein, 260 aa, Artificial Sequence
  MAb1 scFv
MDMRVPAQLLGLLLLWLRGARCEVQLVQSGAEVKKPGESLRISCKGSGYSFSTYWISWVRQMPGKGLEWMGKIYPGDSYTNYSPSFQGQVTISADKSISTAYLQWSSLKASDTAMYYCARGYGIFDYWGQGTLVTVSSGGGGSGGGGSGGGGSSYELTQPPSVSVSPGQTASITCSGDNIGDQYAHWYQQKPGQSPVLVIYQDKNRPSGIPERFSGSNSGNTATLTISGTQAMDEADYYCATYTGFGSLAVFGGGTKLTV

SEQ ID NO: 88 - DNA, 783 bp, Artificial Sequence
  MAb1 scFv
atggacatgagagtgcctgcccagctgttgggcctgctgctgctgtggctgcggggcgcccgatgtgaagtgcagctggtgcagtctggagccgaggtgaagaagcccggagaaagcctgagaatctcctgcaagggcagcggttatagcttctctacatactggatcagctgggtcagacagatgcctggaaaaggcctggaatggatgggcaagatctaccccggcgacagctacaccaactacagccctagtttccaaggacaagtgacaatcagcgccgacaaaagcatcagcaccgcctacctgcagtggtccagcctgaaggccagcgacaccgccatgtactactgcgccagaggctacggcatcttcgactactggggccagggcaccctggtgaccgtgtctagcggcggaggcggaagcggcggcggcggctctggtggaggcggcagttcttacgagctgacacagcctcctagcgtgtccgtgtcacctggccagaccgctagcataacatgcagcggggataacatcggcgatcagtacgcccattggtatcagcagaagcctggccagagccccgtgctggtcatctaccaggacaagaaccggcctagcggtattcctgagagattcagcggaagcaacagcggcaacaccgccacactgaccatcagcggaacccaggccatggacgaggccgattactactgtgccacctacaccggcttcggctccctggccgtgttcggcggaggcacaaagctgaccgtgtga

SEQ ID NO: 89 - protein, 342 aa, Artificial Sequence
  MAb2-scFv-TriXVIII
MDMRVPAQLLGLLLLWLRGARCQVQLQQWGAGLLKPSETLSLTCAVYGGSFSGYYWSWIRQSPEKGLEWIGEINHGGYVTYNPSLESRVTISVDTSKNQFSLKLSSVTAADTAVYYCARDYGPGNYDWYFDLWGRGTLVTVSSGGGGSGGGGSGGGGSEIVLTQSPATLSLSPGERATLSCSASQSVSSYLAWYQQKPGQAPRLLIYDASNRATGIPARFSGSGSGTDFTLTISSLEPEDFAVYYCQQRSNWPPALTFCGGTKVEISGAGGSGGSSGSDGASGSGVRLWATRQAMLGQVHEVPEGWLIFVAEQEELYVRVQNGFRKVQLEARTPLPRGTDNE

SEQ ID NO: 90 - DNA, 1029 bp, Artificial Sequence
  MAb2-scFv-TriXVIII
atggacatgagagtgccggcacagcttctgggactccttttgctttggctccggggtgctcgatgccaggtgcagcttcagcaatggggtgccggactgttgaagccaagcgagacgctgagcctgacatgcgccgtgtatgggggctctttttctgggtattattggtcctggattcggcagagccctgagaaggggctggaatggattggggagatcaatcatggcggctacgttacatataacccctccttggaatcaagagtgaccatctctgtggacacatcaaaaaaccaatttagtctgaagctcagctcagtgacagcagcagacaccgccgtgtactattgcgccagggactatggaccaggcaactacgattggtacttcgacctgtgggggcgaggcactctggtgactgttagttccggaggcggaggaagcggaggtgggggttctggtgggggaggttctgagattgtgctcacacagtcacctgcgacactgtccctctctccgggtgaaagagctaccttgtcctgtagcgcctcccaatcagtgtcctcttatctggcatggtatcaacagaagccaggccaggctccgaggctgctgatttacgatgcgagcaaccgggctacaggaatcccagcaagatttagtggcagcgggagtggaacggattttaccctcaccataagctccctggaaccagaggatttcgccgtgtattactgccagcaaaggtccaattggccacccgctctgactttttgtggtggcactaaggtggagatctctggtgctggaggatcaggtggttctagtggaagtgatggtgctagcgggtctggcgttcgactttgggctacaagacaggcaatgctgggccaggtccatgaggttcctgaggggtggctcattttcgtggccgagcaggaggagctgtatgttcgcgtgcaaaacggctttaggaaggtccagctggaagcgcggacacctttgcccaggggaaccgataacgagtga

SEQ ID NO: 91 - protein, 22 aa, Artificial Sequence
  Signal peptide
MDMRVPAQLLGLLLLWLRGARC

SEQ ID NO: 92 - protein, 116 aa, Artificial Sequence
  CDR MAb1
EVQLVQSGAEVKKPGESLRISCKGSGYSFSTYWISWVRQMPGKGLEWMGKIYPGDSYTNYSPSFQGQVTISADKSISTAYLQWSSLKASDTAMYYCARGYGIFDYWGQGTLVTVSS

SEQ ID NO: 93 - protein, 107 aa, Artificial Sequence
  CDR MAb1
SYELTQPPSVSVSPGQTASITCSGDNIGDQYAHWYQQKPGQSPVLVIYQDKNRPSGIPERFSGSNSGNTATLTISGTQAMDEADYYCATYTGFGSLAVFGGGTKLTV

SEQ ID NO: 94 - DNA, 38 bp, Artificial Sequence
  Primer
gcgcccaagcttgccaccatggacatgagagtgcctgc

SEQ ID NO: 95 - DNA, 74 bp, Artificial Sequence
  Primer
cttctcgaactgggggtggctccagttggagcctccccctgaaccgccggatcccacggtcagctttgtgcctc

SEQ ID NO: 96 - DNA, 83 bp, Artificial Sequence
  Primer
gcgcccgcggccgcttagtgatggtgatggtgatggcccccagaacctcccttctcgaactgggggtggctccagttggagcc

SEQ ID NO: 97 - DNA, 20 bp, Artificial Sequence
  Primer
cacggtcagctttgtgcctc

SEQ ID NO: 98 - DNA, 40 bp, Artificial Sequence
  Primer
gaggcacaaagctgaccgtgtctggtgctggaggatcagg

SEQ ID NO: 99 - DNA, 32 bp, Artificial Sequence
  Primer
gcgcccggatccctcgttatcggttcccctgg

SEQ ID NO: 100 - protein, 121 aa, Artificial Sequence [sequence omitted]

SEQ ID NO: 101 - protein, 108 aa, Artificial Sequence
  CDR VL region MAb2
EIVLTQSPATLSLSPGERATLSCSASQSVSSYLAWYQQKPGQAPRLLIYDASNRATGIPARFSGSGSGTDFTLTISSLEPEDFAVYYCQQRSNWPPALTFCGGTKVEI

SEQ ID NO: 102 - DNA, 111 bp, Artificial Sequence
  Primer
ggctctggctccaactggagccacccccagttcgagaagggaggttctgggggccatcaccatcaccatcacggcggttcagggggaggatccttggacctgcggcagggc

SEQ ID NO: 103 - DNA, 35 bp, Artificial Sequence
  Primer
gcgcccgcggccgcttattccgacctcggtgaagg

SEQ ID NO: 104 - DNA, 108 bp, Artificial Sequence
  Primer
gcgcccaagcttgccaccatgcccatggggtctctgcaaccgctggccaccttgtacctgctggggatgctggtcgcttcctgcctcggaggctctggctccaactgg

SEQ ID NO: 105 - DNA, 113 bp, Artificial Sequence
  Primer
ggctctggctccaactggagccacccccagttcgagaagggaggttctgggggccatcaccatcaccatcacggcggttcagggggaacgcgttctggtgctggaggatcagg

SEQ ID NO: 106 - DNA, 46 bp, Artificial Sequence
  Primer
atgccctgccgcaggtccaaggatccctcgttatcggttcccctgg

SEQ ID NO: 107 - DNA, 44 bp, Artificial Sequence
  Primer
ccaggggaaccgataacgagggatccttggacctgcggcagggc

SEQ ID NO: 108 - DNA, 40 bp, Artificial Sequence
  Primer
gcgcccaagcttgccaccatgcccatgggatcattgcaac

SEQ ID NO: 109 - DNA, 36 bp, Artificial Sequence
  Primer
gcgcccgcggccgcttattcgcttcgaggtgaaggc

SEQ ID NO: 110 - protein, 30 aa, Gallus gallus
ACGCAAAPDIKDLLSRLEELEGLVSSLREQ

SEQ ID NO: 111 - DNA, 78 bp, Artificial Sequence
  Primer
cagctcctccagtctgctcagcaggtccttgatgtctggggcagccgcacagccacaggcacgcgttccccctgaacc

SEQ ID NO: 112 - DNA, 78 bp, Artificial Sequence
  Primer
aaggacctgctgagcagactggaggagctggaggggctggtatcctccctccgggagcagggatccttggacctgcgg

SEQ ID NO: 113 - DNA, 38 bp, Artificial Sequence
  Primer
gcgcccaagcttgccaccatggacatgagagtgccggc

SEQ ID NO: 114 - DNA, 32 bp, Artificial Sequence
  Primer
gcgcccggatccgatctccaccttagtgccac

SEQ ID NO: 115 - DNA, 35296 bp, Artificial Sequence
  Construct in pAV-CMV
catcatcaataatataccttattttggattgaagccaatatgataatgagggggtggagtttgtgacgtggcgcggggcgtgggaacggggcgggtgacgtagtagtgtggcggaagtgtgatgttgcaagtgtggcggaacacatgtaagcgacggatgtggcaaaagtgacgtttttggtgtgcgccggtgtacacaggaagtgacaattttcgcgcggttttaggcggatgttgtagtaaatttgggcgtaaccgagtaagatttggccattttcgcgggaaaactgaataagaggaagtgaaatctgaataattttgtgttactcatagcgcgtaatatttgtctagggccgcggggactttgaccgtttacgtggagactcgcccaggtgtttttctcaggtgttttccgcgttccgggtcaaagttggcgttttattattatagtcagtcgaagcttggatccggtacctctagaattctcgagcggccgctagcgacatcggatctcccgatcccctatggtcgactctcagtacaatctgctctgatgccgcatagttaagccagtatctgctccctgcttgtgtgttggaggtcgctgagtagtgcgcgagcaaaatttaagctacaacaaggcaaggcttgaccgacaattgcatgaagaatctgcttagggttaggcgttttgcgctgcttcgcgatgtacgggccagatatacgcgttgacattgattattgactagttattaatagtaatcaattacggggtcattagttcatagcccatatatggagttccgcgttacataacttacggtaaatggcccgcctggctgaccgcccaacgacccccgcccattgacgtcaataatgacgtatgttcccatagtaacgccaatagggactttccattgacgtcaatgggtggactatttacggtaaactgcccacttggcagtacatcaagtgtatcatatgccaagtacgccccctattgacgtcaatgacggtaaatggcccgcctggcattatgcccagtacatgaccttatgggactttcctacttggcagtacatctacgtattagtcatcgctattaccatggtgatgcggttttggcagtacatcaatgggcgtggatagcggtttgactcacggggatttccaagtctccaccccattgacgtcaatgggagtttgttttggcaccaaaatcaacgggactttccaaaatgtcgtaacaactccgccccattgacgcaaatgggcggtaggcgtgtacggtgggaggtctatataagcagagctctctggctaactagagaacccactgcttactggcttatcgaaattaatacgactcactatagggagacccaagctggctagttaagctatcaacaagtttgtacaaaaaagcaggctgccaccatgcccatggggtctctgcaaccgctggccaccttgtacctgctggggatgctggtcgcttcctgcctcggatctggtgctggaggatcaggtggttctagtggaagtgatggtgctagcgggtctggcgttcgactttgggctacaagacaggcaatgctgggccaggtccatgaggttcctgaggggtggctcattttcgtggccgagcaggaggagctgtatgttcgcgtgcaaaacggctttaggaaggtccagctggaagcgcggacacctttgcccaggggaaccgataacgagggatccttggacctgcggcagggcatgtttgcgcagctggtggcccaaaatgttctgctgatcgatgggcccctgagctggtacagtgacccaggcctggcaggcgtgtccctgacggggggcctgagctacaaagaggacacgaaggagctggtggtggccaaggctggagtctactatgtcttctttcaactagagctgcggcgcgtggtggccggcgagggctcaggctccgtttcacttgcgctgcacctgcagccactgcgctctgctgctggggccgccgccctggctttgaccgtggacctgccacccgcctcctccgaggctcggaactcggccttcggtttccagggccgcttgctgcacctgagtgccggccagcgcctgggcgtccatcttcacactgaggccagggcacgccatgcctggcagcttacccagggcgccacagtcttgggactcttccgggtgacccccgaaatcccagccggactcccttcaccgaggtcggaataaacccagctttcttgtacaaagtggttgatctagagggcccgcggttcgaaggtaagcctatccctaaccctctcctcggtctcgattctacgcgtaccggttagtaatgagtttaaacgggggaggctaactgaaacacggaaggagacaataccggaaggaacccgcgctatgacggcaataaaaagacagaataaaacgcacgggtgttgggtcgtttgttcataaacgcggggttcggtcccagggctggcactctgtcgataccccaccgagaccccattggggccaatacgcccgcgtttcttccttttccccaccccaccccccaagttcgggtgaaggcccagggctcgcagccaacgtcggggcggcaggccctgccatagcagatccgattcgacagatcactgaaatgtgtgggcgtggcttaagggtgggaaagaatatataaggtgggggtcttatgtagttttgtatctgttttgcagcagccgccgccgccatgagcaccaactcgtttgatggaagcattgtgagctcatatttgacaacgcgcatgcccccatgggccggggtgcgtcagaatgtgatgggctccagcattgatggtcgccccgtcctgcccgcaaactctactaccttgacctacgagaccgtgtctggaacgccgttggagactgcagcctccgccgccgcttcagccgctgcagccaccgcccgcgggattgtgactgactttgctttcctgagcccgcttgcaagcagtgcagcttcccgttcatccgcccgcgatgacaagttgacggctcttttggcacaattggattctttgacccgggaacttaatgtcgtttctcagcagctgttggatctgcgccagcaggtttctgccctgaaggcttcctcccctcccaatgcggtttaaaacataaataaaaaaccagactctgtttggatttggatcaagcaagtgtcttgctgtctttatttaggggttttgcgcgcgcggtaggcccgggaccagcggtctcggtcgttgagggtcctgtgtattttttccaggacgtggtaaaggtgactctggatgttcagatacatgggcataagcccgtctctggggtggaggtagcaccactgcagagcttcatgctgcggggtggtgttgtagatgatccagtcgtagcaggagcgctgggcgtggtgcctaaaaatgtctttcagtagcaagctgattgccaggggcaggcccttggtgtaagtgtttacaaagcggttaagctgggatgggtgcatacgtggggatatgagatgcatcttggactgtatttttaggttggctatgttcccagccatatccctccggggattcatgttgtgcagaaccaccagcacagtgtatccggtgcacttgggaaatttgtcatgtagcttagaaggaaatgcgtggaagaacttggagacgcccttgtgacctccaagattttccatgcattcgtccataatgatggcaatgggcccacgggcggcggcctgggcgaagatatttctgggatcactaacgtcatagttgtgttccaggatgagatcgtcataggccatttttacaaagcgcgggcggagggtgccagactgcggtataatggttccatccggcccaggggcgtagttaccctcacagatttgcatttcccacgctttgagttcagatggggggatcatgtctacctgcggggcgatgaagaaaacggtttccggggtaggggagatcagctgggaagaaagcaggttcctgagcagctgcgacttaccgcagccggtgggcccgtaaatcacacctattaccgggtgcaactggtagttaagagagctgcagctgccgtcatccctgagcaggggggccacttcgttaagcatgtccctgactcgcatgttttccctgaccaaatccgccagaaggcgctcgccgcccagcgatagcagttcttgcaaggaagcaaagtttttcaacggtttgagaccgtccgccgtaggcatgcttttgagcgtttgaccaagcagttccaggcggtcccacagctcggtcacctgctctacggcatctcgatccagcatatctcctcgtttcgcgggttggggcggctttcgctgtacggcagtagtcggtgctcgtccagacgggccagggtcatgtctttccacgggcgcagggtcctcgtcagcgtagtctgggtcacggtgaaggggtgcgctccgggctgcgcgctggccagggtgcgcttgaggctggtcctgctggtgctgaagcgctgccggtcttcgccctgcgcgtcggccaggtagcatttgaccatggtgtcatagtccagcccctccgcggcgtggcccttggcgcgcagcttgcccttggaggaggcgccgcacgaggggcagtgcagacttttgagggcgtagagcttgggcgcgagaaataccgattccggggagtaggcatccgcgccgcaggccccgcagacggtctcgcattccacgagccaggtgagctctggccgttcggggtcaaaaaccaggtttcccccatgctttttgatgcgtttcttacctctggtttccatgagccggtgtccacgctcggtgacgaaaaggctgtccgtgtccccgtatacagacttgagaggcctgtcctcgagcggtgttccgcggtcctcctcgtatagaaactcggaccactctgagacaaaggctcgcgtccaggccagcacgaaggaggctaagtgggaggggtagcggtcgttgtccactagggggtccactcgctccagggtgtgaagacacatgtcgccctcttcggcatcaaggaaggtgattggtttgtaggtgtaggccacgtgaccgggtgttcctgaaggggggctataaaagggggtgggggcgcgttcgtcctcactctcttccgcatcgctgtctgcgagggccagctgttggggtgagtactccctctgaaaagcgggcatgacttctgcgctaagattgtcagtttccaaaaacgaggaggatttgatattcacctggcccgcggtgatgcctttgagggtggccgcatccatctggtcagaaaagacaatctttttgttgtcaagcttggtggcaaacgacccgtagagggcgttggacagcaacttggcgatggagcgcagggtttggtttttgtcgcgatcggcgcgctccttggccgcgatgtttagctgcacgtattcgcgcgcaacgcaccgccattcgggaaagacggtggtgcgctcgtcgggcaccaggtgcacgcgccaaccgcggttgtgcagggtgacaaggtcaacgctggtggctacctctccgcgtaggcgctcgttggtccagcagaggcggccgcccttgcgcgagcagaatggcggtagggggtctagctgcgtctcgtccggggggtctgcgtccacggtaaagaccccgggcagcaggcgcgcgtcgaagtagtctatcttgcatccttgcaagtctagcgcctgctgccatgcgcgggcggcaagcgcgcgctcgtatgggttgagtgggggaccccatggcatggggtgggtgagcgcggaggcgtacatgccgcaaatgtcgtaaacgtagaggggctctctgagtattccaagatatgtagggtagcatcttccaccgcggatgctggcgcgcacgtaatcgtatagttcgtgcgagggagcgaggaggtcgggaccgaggttgctacgggcgggctgctctgctcggaagactatctgcctgaagatggcatgtgagttggatgatatggttggacgctggaagacgttgaagctggcgtctgtgagacctaccgcgtcacgcacgaaggaggcgtaggagtcgcgcagcttgttgaccagctcggcggtgacctgcacgtctagggcgcagtagtccagggtttccttgatgatgtcatacttatcctgtcccttttttttccacagctcgcggttgaggacaaactcttcgcggtctttccagtactcttggatcggaaacccgtcggcctccgaacggtaagagcctagcatgtagaactggttgacggcctggtaggcgcagcatcccttttctacgggtagcgcgtatgcctgcgcggccttccggagcgaggtgtgggtgagcgcaaaggtgtccctgaccatgactttgaggtactggtatttgaagtcagtgtcgtcgcatccgccctgctcccagagcaaaaagtccgtgcgctttttggaacgcggatttggcagggcgaaggtgacatcgttgaagagtatctttcccgcgcgaggcataaagttgcgtgtgatgcggaagggtcccggcacctcggaacggttgttaattacctgggcggcgagcacgatctcgtcaaagccgttgatgttgtggcccacaatgtaaagttccaagaagcgcgggatgcccttgatggaaggcaattttttaagttcctcgtaggtgagctcttcaggggagctgagcccgtgctctgaaagggcccagtctgcaagatgagggttggaagcgacgaatgagctccacaggtcacgggccattagcatttgcaggtggtcgcgaaaggtcctaaactggcgacctatggccattttttctggggtgatgcagtagaaggtaagcgggtcttgttcccagcggtcccatccaaggttcgcggctaggtctcgcgcggcagtcactagaggctcatctccgccgaacttcatgaccagcatgaagggcacgagctgcttcccaaaggcccccatccaagtataggtctctacatcgtaggtgacaaagagacgctcggtgcgaggatgcgagccgatcgggaagaactggatctcccgccaccaattggaggagtggctattgatgtggtgaaagtagaagtccctgcgacgggccgaacactcgtgctggcttttgtaaaaacgtgcgcagtactggcagcggtgcacgggctgtacatcctgcacgaggttgacctgacgaccgcgcacaaggaagcagagtgggaatttgagcccctcgcctggcgggtttggctggtggtcttctacttcggctgcttgtccttgaccgtctggctgctcgaggggagttacggtggatcggaccaccacgccgcgcgagcccaaagtccagatgtccgcgcgcggcggtcggagcttgatgacaacatcgcgcagatgggagctgtccatggtctggagctcccgcggcgtcaggtcaggcgggagctcctgcaggtttacctcgcatagacgggtcagggcgcgggctagatccaggtgatacctaatttccaggggctggttggtggcggcgtcgatggcttgcaagaggccgcatccccgcggcgcgactacggtaccgcgcggcgggcggtgggccgcgggggtgtccttggatgatgcatctaaaagcggtgacgcgggcgagcccccggaggtagggggggctccggacccgccgggagagggggcaggggcacgtcggcgccgcgcgcgggcaggagctggtgctgcgcgcgtaggttgctggcgaacgcgacgacgcggcggttgatctcctgaatctggcgcctctgcgtgaagacgacgggcccggtgagcttgagcctgaaagagagttcgacagaatcaatttcggtgtcgttgacggcggcctggcgcaaaatctcctgcacgtctcctgagttgtcttgataggcgatctcggccatgaactgctcgatctcttcctcctggagatctccgcgtccggctcgctccacggtggcggcgaggtcgttggaaatgcgggccatgagctgcgagaaggcgttgaggcctccctcgttccagacgcggctgtagaccacgcccccttcggcatcgcgggcgcgcatgaccacctgcgcgagattgagctccacgtgccgggcgaagacggcgtagtttcgcaggcgctgaaagaggtagttgagggtggtggcggtgtgttctgccacgaagaagtacataacccagcgtcgcaacgtggattcgttgatatcccccaaggcctcaaggcgctccatggcctcgtagaagtccacggcgaagttgaaaaactgggagttgcgcgccgacacggttaactcctcctccagaagacggatgagctcggcgacagtgtcgcgcacctcgcgctcaaaggctacaggggcctcttcttcttcttcaatctcctcttccataagggcctccccttcttcttcttctggcggcggtgggggaggggggacacggcggcgacgacggcgcaccgggaggcggtcgacaaagcgctcgatcatctccccgcggcgacggcgcatggtctcggtgacggcgcggccgttctcgcgggggcgcagttggaagacgccgcccgtcatgtcccggttatgggttggcggggggctgccatgcggcagggatacggcgctaacgatgcatctcaacaattgttgtgtaggtactccgccgccgagggacctgagcgagtccgcatcgaccggatcggaaaacctctcgagaaaggcgtctaaccagtcacagtcgcaaggtaggctgagcaccgtggcgggcggcagcgggcggcggtcggggttgtttctggcggaggtgctgctgatgatgtaattaaagtaggcggtcttgagacggcggatggtcgacagaagcaccatgtccttgggtccggcctgctgaatgcgcaggcggtcggccatgccccaggcttcgttttgacatcggcgcaggtctttgtagtagtcttgcatgagcctttctaccggcacttcttcttctccttcctcttgtcctgcatctcttgcatctatcgctgcggcggcggcggagtttggccgtaggtggcgccctcttcctcccatgcgtgtgaccccgaagcccctcatcggctgaagcagggctaggtcggcgacaacgcgctcggctaatatggcctgctgcacctgcgtgagggtagactggaagtcatccatgtccacaaagcggtggtatgcgcccgtgttgatggtgtaagtgcagttggccataacggaccagttaacggtctggtgacccggctgcgagagctcggtgtacctgagacgcgagtaagccctcgagtcaaatacgtagtcgttgcaagtccgcaccaggtactggtatcccaccaaaaagtgcggcggcggctggcggtagaggggccagcgtagggtggccggggctccgggggcgagatcttccaacataaggcgatgatatccgtagatgtacctggacatccaggtgatgccggcggcggtggtggaggcgcgcggaaagtcgcggacgcggttccagatgttgcgcagcggcaaaaagtgctccatggtcgggacgctctggccggtcaggcgcgcgcaatcgttgacgctctagaccgtgcaaaaggagagcctgtaagcgggcactcttccgtggtctggtggataaattcgcaagggtatcatggcggacgaccggggttcgagccccgtatccggccgtccgccgtgatccatgcggttaccgcccgcgtgtcgaacccaggtgtgcgacgtcagacaacgggggagtgctccttttggcttccttccaggcgcggcggctgctgcgctagcttttttggccactggccgcgcgcagcgtaagcggttaggctggaaagcgaaagcattaagtggctcgctccctgtagccggagggttattttccaagggttgagtcgcgggacccccggttcgagtctcggaccggccggactgcggcgaacgggggtttgcctccccgtcatgcaagaccccgcttgcaaattcctccggaaacagggacgagccccttttttgcttttcccagatgcatccggtgctgcggcagatgcgcccccctcctcagcagcggcaagagcaagagcagcggcagacatgcagggcaccctcccctcctcctaccgcgtcaggaggggcgacatccgcggttgacgcggcagcagatggtgattacgaacccccgcggcgccgggcccggcactacctggacttggaggagggcgagggcctggcgcggctaggagcgccctctcctgagcggtacccaagggtgcagctgaagcgtgatacgcgtgaggcgtacgtgccgcggcagaacctgtttcgcgaccgcgagggagaggagcccgaggagatgcgggatcgaaagttccacgcagggcgcgagctgcggcatggcctgaatcgcgagcggttgctgcgcgaggaggactttgagcccgacgcgcgaaccgggattagtcccgcgcgcgcacacgtggcggccgccgacctggtaaccgcatacgagcagacggtgaaccaggagattaactttcaaaaaagctttaacaaccacgtgcgtacgcttgtggcgcgcgaggaggtggctataggactgatgcatctgtgggactttgtaagcgcgctggagcaaaacccaaatagcaagccgctcatggcgcagctgttccttatagtgcagcacagcagggacaacgaggcattcagggatgcgctgctaaacatagtagagcccgagggccgctggctgctcgatttgataaacatcctgcagagcatagtggtgcaggagcgcagcttgagcctggctgacaaggtggccgccatcaactattccatgcttagcctgggcaagttttacgcccgcaagatataccataccccttacgttcccatagacaaggaggtaaagatcgaggggttctacatgcgcatggcgctgaaggtgcttaccttgagcgacgacctgggcgtttatcgcaacgagcgcatccacaaggccgtgagcgtgagccggcggcgcgagctcagcgaccgcgagctgatgcacagcctgcaaagggccctggctggcacgggcagcggcgatagagaggccgagtcctactttgacgcgggcgctgacctgcgctgggccccaagccgacgcgccctggaggcagctggggccggacctgggctggcggtggcacccgcgcgcgctggcaacgtcggcggcgtggaggaatatgacgaggacgatgagtacgagccagaggacggcgagtactaagcggtgatgtttctgatcagatgatgcaagacgcaacggacccggcggtgcgggcggcgctgcagagccagccgtccggccttaactccacggacgactggcgccaggtcatggaccgcatcatgtcgctgactgcgcgcaatcctgacgcgttccggcagcagccgcaggccaaccggctctccgcaattctggaagcggtggtcccggcgcgcgcaaaccccacgcacgagaaggtgctggcgatcgtaaacgcgctggccgaaaacagggccatccggcccgacgaggccggcctggtctacgacgcgctgcttcagcgcgtggctcgttacaacagcggcaacgtgcagaccaacctggaccggctggtgggggatgtgcgcgaggccgtggcgcagcgtgagcgcgcgcagcagcagggcaacctgggctccatggttgcactaaacgccttcctgagtacacagcccgccaacgtgccgcggggacaggaggactacaccaactttgtgagcgcactgcggctaatggtgactgagacaccgcaaagtgaggtgtaccagtctgggccagactattttttccagaccagtagacaaggcctgcagaccgtaaacctgagccaggctttcaaaaacttgcaggggctgtggggggtgcgggctcccacaggcgaccgcgcgaccgtgtctagcttgctgacgcccaactcgcgcctgttgctgctgctaatagcgcccttcacggacagtggcagcgtgtcccgggacacatacctaggtcacttgctgacactgtaccgcgaggccataggtcaggcgcatgtggacgagcatactttccaggagattacaagtgtcagccgcgcgctggggcaggaggacacgggcagcctggaggcaaccctaaactacctgctgaccaaccggcggcagaagatcccctcgttgcacagtttaaacagcgaggaggagcgcattttgcgctacgtgcagcagagcgtgagccttaacctgatgcgcgacggggtaacgcccagcgtggcgctggacatgaccgcgcgcaacatggaaccgggcatgtatgcctcaaaccggccgtttatcaaccgcctaatggactacttgcatcgcgcggccgccgtgaaccccgagtatttcaccaatgccatcttgaacccgcactggctaccgccccctggtttctacaccgggggattcgaggtgcccgagggtaacgatggattcctctgggacgacatagacgacagcgtgttttccccgcaaccgcagaccctgctagagttgcaacagcgcgagcaggcagaggcggcgctgcgaaaggaaagcttccgcaggccaagcagcttgtccgatctaggcgctgcggccccgcggtcagatgctagtagcccatttccaagcttgatagggtctcttaccagcactcgcaccacccgcccgcgcctgctgggcgaggaggagtacctaaacaactcgctgctgcagccgcagcgcgaaaaaaacctgcctccggcatttcccaacaacgggatagagagcctagtggacaagatgagtagatggaagacgtacgcgcaggagcacagggacgtgccaggcccgcgcccgcccacccgtcgtcaaaggcacgaccgtcagcggggtctggtgtgggaggacgatgactcggcagacgacagcagcgtcctggatttgggagggagtggcaacccgtttgcgcaccttcgccccaggctggggagaatgttttaaaaaaaaaaaagcatgatgcaaaataaaaaactcaccaaggccatggcaccgagcgttggttttcttgtattccccttagtatgcggcgcgcggcgatgtatgaggaaggtcctcctccctcctacgagagtgtggtgagcgcggcgccagtggcggcggcgctgggttctcccttcgatgctcccctggacccgccgtttgtgcctccgcggtacctgcggcctaccggggggagaaacagcatccgttactctgagttggcacccctattcgacaccacccgtgtgtacctggtggacaacaagtcaacggatgtggcatccctgaactaccagaacgaccacagcaactttctgaccacggtcattcaaaacaatgactacagcccgggggaggcaagcacacagaccatcaatcttgacgaccggtcgcactggggcggcgacctgaaaaccatcctgcataccaacatgccaaatgtgaacgagttcatgtttaccaataagtttaaggcgcgggtgatggtgtcgcgcttgcctactaaggacaatcaggtggagctgaaatacgagtgggtggagttcacgctgcccgagggcaactactccgagaccatgaccatagaccttatgaacaacgcgatcgtggagcactacttgaaagtgggcagacagaacggggttctggaaagcgacatcggggtaaagtttgacacccgcaacttcagactggggtttgaccccgtcactggtcttgtcatgcctggggtatatacaaacgaagccttccatccagacatcattttgctgccaggatgcggggtggacttcacccacagccgcctgagcaacttgttgggcatccgcaagcggcaacccttccaggagggctttaggatcacctacgatgatctggagggtggtaacattcccgcactgttggatgtggacgcctaccaggcgagcttgaaagatgacaccgaacagggcgggggtggcgcaggcggcagcaacagcagtggcagcggcgcggaagagaactccaacgcggcagccgcggcaatgcagccggtggaggacatgaacgatcatgccattcgcggcgacacctttgccacacgggctgaggagaagcgcgctgaggccgaagcagcggccgaagctgccgcccccgctgcgcaacccgaggtcgagaagcctcagaagaaaccggtgatcaaacccctgacagaggacagcaagaaacgcagttacaacctaataagcaatgacagcaccttcacccagtaccgcagctggtaccttgcatacaactacggcgaccctcagaccggaatccgctcatggaccctgctttgcactcctgacgtaacctgcggctcggagcaggtctactggtcgttgccagacatgatgcaagaccccgtgaccttccgctccacgcgccagatcagcaactttccggtggtgggcgccgagctgttgcccgtgcactccaagagcttctacaacgaccaggccgtctactcccaactcatccgccagtttacctctctgacccacgtgttcaatcgctttcccgagaaccagattttggcgcgcccgccagcccccaccatcaccaccgtcagtgaaaacgttcctgctctcacagatcacgggacgctaccgctgcgcaacagcatcggaggagtccagcgagtgaccattactgacgccagacgccgcacctgcccctacgtttacaaggccctgggcatagtctcgccgcgcgtcctatcgagccgcactttttgagcaagcatgtccatccttatatcgcccagcaataacacaggctggggcctgcgcttcccaagcaagatgtttggcggggccaagaagcgctccgaccaacacccagtgcgcgtgcgcgggcactaccgcgcgccctggggcgcgcacaaacgcggccgcactgggcgcaccaccgtcgatgacgccatcgacgcggtggtggaggaggcgcgcaactacacgcccacgccgccaccagtgtccacagtggacgcggccattcagaccgtggtgcgcggagcccggcgctatgctaaaatgaagagacggcggaggcgcgtagcacgtcgccaccgccgccgacccggcactgccgcccaacgcgcggcggcggccctgcttaaccgcgcacgtcgcaccggccgacgggcggccatgcgggccgctcgaaggctggccgcgggtattgtcactgtgccccccaggtccaggcgacgagcggccgccgcagcagccgcggccattagtgctatgactcagggtcgcaggggcaacgtgtattgggtgcgcgactcggttagcggcctgcgcgtgcccgtgcgcacccgccccccgcgcaactagattgcaagaaaaaactacttagactcgtactgttgtatgtatccagcggcggcggcgcgcaacgaagctatgtccaagcgcaaaatcaaagaagagatgctccaggtcatcgcgccggagatctatggccccccgaagaaggaagagcaggattacaagccccgaaagctaaagcgggtcaaaaagaaaaagaaagatgatgatgatgaacttgacgacgaggtggaactgctgcacgctaccgcgcccaggcgacgggtacagtggaaaggtcgacgcgtaaaacgtgttttgcgacccggcaccaccgtagtctttacgcccggtgagcgctccacccgcacctacaagcgcgtgtatgatgaggtgtacggcgacgaggacctgcttgagcaggccaacgagcgcctcggggagtttgcctacggaaagcggcataaggacatgctggcgttgccgctggacgagggcaacccaacacctagcctaaagcccgtaacactgcagcaggtgctgcccgcgcttgcaccgtccgaagaaaagcgcggcctaaagcgcgagtctggtgacttggcacccaccgtgcagctgatggtacccaagcgccagcgactggaagatgtcttggaaaaaatgaccgtggaacctgggctggagcccgaggtccgcgtgcggccaatcaagcaggtggcgccgggactgggcgtgcagaccgtggacgttcagatacccactaccagtagcaccagtattgccaccgccacagagggcatggagacacaaacgtccccggttgcctcagcggtggcggatgccgcggtgcaggcggtcgctgcggccgcgtccaagacctctacggaggtgcaaacggacccgtggatgtttcgcgtttcagccccccggcgcccgcgcggttcgaggaagtacggcgccgccagcgcgctactgcccgaatatgccctacatccttccattgcgcctacccccggctatcgtggctacacctaccgccccagaagacgagcaactacccgacgccgaaccaccactggaacccgccgccgccgtcgccgtcgccagcccgtgctggccccgatttccgtgcgcagggtggctcgcgaaggaggcaggaccctggtgctgccaacagcgcgctaccaccccagcatcgtttaaaagccggtctttgtggttcttgcagatatggccctcacctgccgcctccgtttcccggtgccgggattccgaggaagaatgcaccgtaggaggggcatggccggccacggcctgacgggcggcatgcgtcgtgcgcaccaccggcggcggcgcgcgtcgcaccgtcgcatgcgcggcggtatcctgcccctccttattccactgatcgccgcggcgattggcgccgtgcccggaattgcatccgtggccttgcaggcgcagagacactgattaaaaacaagttgcatgtggaaaaatcaaaataaaaagtctggactctcacgctcgcttggtcctgtaactattttgtagaatggaagacatcaactttgcgtctctggccccgcgacacggctcgcgcccgttcatgggaaactggcaagatatcggcaccagcaatatgagcggtggcgccttcagctggggctcgctgtggagcggcattaaaaatttcggttccaccgttaagaactatggcagcaaggcctggaacagcagcacaggccagatgctgagggataagttgaaagagcaaaatttccaacaaaaggtggtagatggcctggcctctggcattagcggggtggtggacctggccaaccaggcagtgcaaaataagattaacagtaagcttgatccccgccctcccgtagaggagcctccaccggccgtggagacagtgtctccagaggggcgtggcgaaaagcgtccgcgccccgacagggaagaaactctggtgacgcaaatagacgagcctccctcgtacgaggaggcactaaagcaaggcctgcccaccacccgtcccatcgcgcccatggctaccggagtgctgggccagcacacacccgtaacgctggacctgcctccccccgccgacacccagcagaaacctgtgctgccaggcccgaccgccgttgttgtaacccgtcctagccgcgcgtccctgcgccgcgccgccagcggtccgcgatcgttgcggcccgtagccagtggcaactggcaaagcacactgaacagcatcgtgggtctgggggtgcaatccctgaagcgccgacgatgcttctgaatagctaacgtgtcgtatgtgtgtcatgtatgcgtccatgtcgccgccagaggagctgctgagccgccgcgcgcccgctttccaagatggctaccccttcgatgatgccgcagtggtcttacatgcacatctcgggccaggacgcctcggagtacctgagccccgggctggtgcagtttgcccgcgccaccgagacgtacttcagcctgaataacaagtttagaaaccccacggtggcgcctacgcacgacgtgaccacagaccggtcccagcgtttgacgctgcggttcatccctgtggaccgtgaggatactgcgtactcgtacaaggcgcggttcaccctagctgtgggtgataaccgtgtgctggacatggcttccacgtactttgacatccgcggcgtgctggacaggggccctacttttaagccctactctggcactgcctacaacgccctggctcccaagggtgccccaaatccttgcgaatgggatgaagctgctactgctcttgaaataaacctagaagaagaggacgatgacaacgaagacgaagtagacgagcaagctgagcagcaaaaaactcacgtatttgggcaggcgccttattctggtataaatattacaaaggagggtattcaaataggtgtcgaaggtcaaacacctaaatatgccgataaaacatttcaacctgaacctcaaataggagaatctcagtggtacgaaactgaaattaatcatgcagctgggagagtccttaaaaagactaccccaatgaaaccatgttacggttcatatgcaaaacccacaaatgaaaatggagggcaaggcattcttgtaaagcaacaaaatggaaagctagaaagtcaagtggaaatgcaatttttctcaactactgaggcgaccgcaggcaatggtgataacttgactcctaaagtggtattgtacagtgaagatgtagatatagaaaccccagacactcatatttcttacatgcccactattaaggaaggtaactcacgagaactaatgggccaacaatctatgcccaacaggcctaattacattgcttttagggacaattttattggtctaatgtattacaacagcacgggtaatatgggtgttctggcgggccaagcatcgcagttgaatgctgttgtagatttgcaagacagaaacacagagctttcataccagcttttgcttgattccattggtgatagaaccaggtacttttctatgtggaatcaggctgttgacagctatgatccagatgttagaattattgaaaatcatggaactgaagatgaacttccaaattactgctttccactgggaggtgtgattaatacagagactcttaccaaggtaaaacctaaaacaggtcaggaaaatggatgggaaaaagatgctacagaattttcagataaaaatgaaataagagttggaaataattttgccatggaaatcaatctaaatgccaacctgtggagaaatttcctgtactccaacatagcgctgtatttgcccgacaagctaaagtacagtccttccaacgtaaaaatttctgataacccaaacacctacgactacatgaacaagcgagtggtggctcccgggttagtggactgctacattaaccttggagcacgctggtcccttgactatatggacaacgtcaacccatttaaccaccaccgcaatgctggcctgcgctaccgctcaatgttgctgggcaatggtcgctatgtgcccttccacatccaggtgcctcagaagttctttgccattaaaaacctccttctcctgccgggctcatacacctacgagtggaacttcaggaaggatgttaacatggttctgcagagctccctaggaaatgacctaagggttgacggagccagcattaagtttgatagcatttgcctttacgccaccttcttccccatggcccacaacaccgcctccacgcttgaggccatgcttagaaacgacaccaacgaccagtcctttaacgactatctctccgccgccaacatgctctaccctatacccgccaacgctaccaacgtgcccatatccatcccctcccgcaactgggcggctttccgcggctgggccttcacgcgccttaagactaaggaaaccccatcactgggctcgggctacgacccttattacacctactctggctctataccctacctagatggaaccttttacctcaaccacacctttaagaaggtggccattacctttgactcttctgtcagctggcctggcaatgaccgcctgcttacccccaacgagtttgaaattaagcgctcagttgacggggagggttacaacgttgcccagtgtaacatgaccaaagactggttcctggtacaaatgctagctaactacaacattggctaccagggcttctatatcccagagagctacaaggaccgcatgtactccttctttagaaacttccagcccatgagccgtcaggtggtggatgatactaaatacaaggactaccaacaggtgggcatcctacaccaacacaacaactctggatttgttggctaccttgcccccaccatgcgcgaaggacaggcctaccctgctaacttcccctatccgcttataggcaagaccgcagttgacagcattacccagaaaaagtttctttgcgatcgcaccctttggcgcatcccattctccagtaactttatgtccatgggcgcactcacagacctgggccaaaaccttctctacgccaactccgcccacgcgctagacatgacttttgaggtggatcccatggacgagcccacccttctttatgttttgtttgaagtctttgacgtggtccgtgtgcaccggccgcaccgcggcgtcatcgaaaccgtgtacctgcgcacgcccttctcggccggcaacgccacaacataaagaagcaagcaacatcaacaacagctgccgccatgggctccagtgagcaggaactgaaagccattgtcaaagatcttggttgtgggccatattttttgggcacctatgacaagcgctttccaggctttgtttctccacacaagctcgcctgcgccatagtcaatacggccggtcgcgagactgggggcgtacactggatggcctttgcctggaacccgcactcaaaaacatgctacctctttgagccctttggcttttctgaccagcgactcaagcaggtttaccagtttgagtacgagtcactcctgcgccgtagcgccattgcttcttcccccgaccgctgtataacgctggaaaagtccacccaaagcgtacaggggcccaactcggccgcctgtggactattctgctgcatgtttctccacgcctttgccaactggccccaaactcccatggatcacaaccccaccatgaaccttattaccggggtacccaactccatgctcaacagtccccaggtacagcccaccctgcgtcgcaaccaggaacagctctacagcttcctggagcgccactcgccctacttccgcagccacagtgcgcagattaggagcgccacttctttttgtcacttgaaaaacatgtaaaaataatgtactagagacactttcaataaaggcaaatgcttttatttgtacactctcgggtgattatttacccccacccttgccgtctgcgccgtttaaaaatcaaaggggttctgccgcgcatcgctatgcgccactggcagggacacgttgcgatactggtgtttagtgctccacttaaactcaggcacaaccatccgcggcagctcggtgaagttttcactccacaggctgcgcaccatcaccaacgcgtttagcaggtcgggcgccgatatcttgaagtcgcagttggggcctccgccctgcgcgcgcgagttgcgatacacagggttgcagcactggaacactatcagcgccgggtggtgcacgctggccagcacgctcttgtcggagatcagatccgcgtccaggtcctccgcgttgctcagggcgaacggagtcaactttggtagctgccttcccaaaaagggcgcgtgcccaggctttgagttgcactcgcaccgtagtggcatcaaaaggtgaccgtgcccggtctgggcgttaggatacagcgcctgcataaaagccttgatctgcttaaaagccacctgagcctttgcgccttcagagaagaacatgccgcaagacttgccggaaaactgattggccggacaggccgcgtcgtgcacgcagcaccttgcgtcggtgttggagatctgcaccacatttcggccccaccggttcttcacgatcttggccttgctagactgctccttcagcgcgcgctgcccgttttcgctcgtcacatccatttcaatcacgtgctccttatttatcataatgcttccgtgtagacacttaagctcgccttcgatctcagcgcagcggtgcagccacaacgcgcagcccgtgggctcgtgatgcttgtaggtcacctctgcaaacgactgcaggtacgcctgcaggaatcgccccatcatcgtcacaaaggtcttgttgctggtgaaggtcagctgcaacccgcggtgctcctcgttcagccaggtcttgcatacggccgccagagcttccacttggtcaggcagtagtttgaagttcgcctttagatcgttatccacgtggtacttgtccatcagcgcgcgcgcagcctccatgcccttctcccacgcagacacgatcggcacactcagcgggttcatcaccgtaatttcactttccgcttcgctgggctcttcctcttcctcttgcgtccgcataccacgcgccactgggtcgtcttcattcagccgccgcactgtgcgcttacctcctttgccatgcttgattagcaccggtgggttgctgaaacccaccatttgtagcgccacatcttctctttcttcctcgctgtccacgattacctctggtgatggcgggcgctcgggcttgggagaagggcgcttctttttcttcttgggcgcaatggccaaatccgccgccgaggtcgatggccgcgggctgggtgtgcgcggcaccagcgcgtcttgtgatgagtcttcctcgtcctcggactcgatacgccgcctcatccgcttttttgggggcgcccggggaggcggcggcgacggggacggggacgacacgtcctccatggttgggggacgtcgcgccgcaccgcgtccgcgctcgggggtggtttcgcgctgctcctcttcccgactggccatttccttctcctataggcagaaaaagatcatggagtcagtcgagaagaaggacagcctaaccgccccctctgagttcgccaccaccgcctccaccgatgccgccaacgcgcctaccaccttccccgtcgaggcacccccgcttgaggaggaggaagtgattatcgagcaggacccaggttttgtaagcgaagacgacgaggaccgctcagtaccaacagaggataaaaagcaagaccaggacaacgcagaggcaaacgaggaacaagtcgggcggggggacgaaaggcatggcgactacctagatgtgggagacgacgtgctgttgaagcatctgcagcgccagtgcgccattatctgcgacgcgttgcaagagcgcagcgatgtgcccctcgccatagcggatgtcagccttgcctacgaacgccacctattctcaccgcgcgtaccccccaaacgccaagaaaacggcacatgcgagcccaacccgcgcctcaacttctaccccgtatttgccgtgccagaggtgcttgccacctatcacatctttttccaaaactgcaagatacccctatcctgccgtgccaaccgcagccgagcggacaagcagctggccttgcggcagggcgctgtcatacctgatatcgcctcgctcaacgaagtgccaaaaatctttgagggtcttggacgcgacgagaagcgcgcggcaaacgctctgcaacaggaaaacagcgaaaatgaaagtcactctggagtgttggtggaactcgagggtgacaacgcgcgcctagccgtactaaaacgcagcatcgaggtcacccactttgcctacccggcacttaacctaccccccaaggtcatgagcacagtcatgagtgagctgatcgtgcgccgtgcgcagcccctggagagggatgcaaatttgcaagaacaaacagaggagggcctacccgcagttggcgacgagcagctagcgcgctggcttcaaacgcgcgagcctgccgacttggaggagcgacgcaaactaatgatggccgcagtgctcgttaccgtggagcttgagtgcatgcagcggttctttgctgacccggagatgcagcgcaagctagaggaaacattgcactacacctttcgacagggctacgtacgccaggcctgcaagatctccaacgtggagctctgcaacctggtctcctaccttggaattttgcacgaaaaccgccttgggcaaaacgtgcttcattccacgctcaagggcgaggcgcgccgcgactacgtccgcgactgcgtttacttatttctatgctacacctggcagacggccatgggcgtttggcagcagtgcttggaggagtgcaacctcaaggagctgcagaaactgctaaagcaaaacttgaaggacctatggacggccttcaacgagcgctccgtggccgcgcacctggcggacatcattttccccgaacgcctgcttaaaaccctgcaacagggtctgccagacttcaccagtcaaagcatgttgcagaactttaggaactttatcctagagcgctcaggaatcttgcccgccacctgctgtgcacttcctagcgactttgtgcccattaagtaccgcgaatgccctccgccgctttggggccactgctaccttctgcagctagccaactaccttgcctaccactctgacataatggaagacgtgagcggtgacggtctactggagtgtcactgtcgctgcaacctatgcaccccgcaccgctccctggtttgcaattcgcagctgcttaacgaaagtcaaattatcggtacctttgagctgcagggtccctcgcctgacgaaaagtccgcggctccggggttgaaactcactccggggctgtggacgtcggcttaccttcgcaaatttgtacctgaggactaccacgcccacgagattaggttctacgaagaccaatcccgcccgccaaatgcggagcttaccgcctgcgtcattacccagggccacattcttggccaattgcaagccatcaacaaagcccgccaagagtttctgctacgaaagggacggggggtttacttggacccccagtccggcgaggagctcaacccaatccccccgccgccgcagccctatcagcagcagccgcgggcccttgcttcccaggatggcacccaaaaagaagctgcagctgccgccgccacccacggacgaggaggaatactgggacagtcaggcagaggaggttttggacgaggaggaggaggacatgatggaagactgggagagcctagacgaggaagcttccgaggtcgaagaggtgtcagacgaaacaccgtcaccctcggtcgcattcccctcgccggcgccccagaaatcggcaaccggttccagcatggctacaacctccgctcctcaggcgccgccggcactgcccgttcgccgacccaaccgtagatgggacaccactggaaccagggccggtaagtccaagcagccgccgccgttagcccaagagcaacaacagcgccaaggctaccgctcatggcgcgggcacaagaacgccatagttgcttgcttgcaagactgtgggggcaacatctccttcgcccgccgctttcttctctaccatcacggcgtggccttcccccgtaacatcctgcattactaccgtcatctctacagcccatactgcaccggcggcagcggcagcggcagcaacagcagcggccacacagaagcaaaggcgaccggatagcaagactctgacaaagcccaagaaatccacagcggcggcagcagcaggaggaggagcgctgcgtctggcgcccaacgaacccgtatcgacccgcgagcttagaaacaggatttttcccactctgtatgctatatttcaacagagcaggggccaagaacaagagctgaaaataaaaaacaggtctctgcgatccctcacccgcagctgcctgtatcacaaaagcgaagatcagcttcggcgcacgctggaagacgcggaggctctcttcagtaaatactgcgcgctgactcttaaggactagtttcgcgccctttctcaaatttaagcgcgaaaactacgtcatctccagcggccacacccggcgccagcacctgtcgtcagcgccattatgagcaaggaaattcccacgccctacatgtggagttaccagccacaaatgggacttgcggctggagctgcccaagactactcaacccgaataaactacatgagcgcgggaccccacatgatatcccgggtcaacggaatccgcgcccaccgaaaccgaattctcttggaacaggcggctattaccaccacacctcgtaataaccttaatccccgtagttggcccgctgccctggtgtaccaggaaagtcccgctcccaccactgtggtacttcccagagacgcccaggccgaagttcagatgactaactcaggggcgcagcttgcgggcggctttcgtcacagggtgcggtcgcccgggcagggtataactcacctgacaatcagagggcgaggtattcagctcaacgacgagtcggtgagctcctcgcttggtctccgtccggacgggacatttcagatcggcggcgccggccgtccttcattcacgcctcgtcaggcaatcctaactctgcagacctcgtcctctgagccgcgctctggaggcattggaactctgcaatttattgaggagtttgtgccatcggtctactttaaccccttctcgggacctcccggccactatccggatcaatttattcctaactttgacgcggtaaaggactcggcggacggctacgactgaatgttaagtggagaggcagagcaactgcgcctgaaacacctggtccactgtcgccgccacaagtgctttgcccgcgactccggtgagttttgctactttgaattgcccgaggatcatatcgagggcccggcgcacggcgtccggcttaccgcccagggagagcttgcccgtagcctgattcgggagtttacccagcgccccctgctagttgagcgggacaggggaccctgtgttctcactgtgatttgcaactgtcctaaccttggattacatcaagatctttgttgccatctctgtgctgagtataataaatacagaaattaaaatatactggggctcctatcgccatcctgtaaacgccaccgtcttcacccgcccaagcaaaccaaggcgaaccttacctggtacttttaacatctctccctctgtgatttacaacagtttcaacccagacggagtgagtctacgagagaacctctccgagctcagctactccatcagaaaaaacaccaccctccttacctgccgggaacgtacgagtgcgtcaccggccgctgcaccacacctaccgcctgaccgtaaaccagactttttccggacagacctcaataactctgtttaccagaacaggaggtgagcttagaaaacccttagggtattaggccaaaggcgcagctactgtggggtttatgaacaattcaagcaactctacgggctattctaattcaggtttctctagaaatggacggaattattacagagcagcgcctgctagaaagacgcagggcagcggccgagcaacagcgcatgaatcaagagctccaagacatggttaacttgcaccagtgcaaaaggggtatcttttgtctggtaaagcaggccaaagtcacctacgacagtaataccaccggacaccgccttagctacaagttgccaaccaagcgtcagaaattggtggtcatggtgggagaaaagcccattaccataactcagcactcggtagaaaccgaaggctgcattcactcaccttgtcaaggacctgaggatctctgcacccttattaagaccctgtgcggtctcaaagatcttattccctttaactaataaaaaaaaataataaagcatcacttacttaaaatcagttagcaaatttctgtccagtttattcagcagcacctccttgccctcctcccagctctggtattgcagcttcctcctggctgcaaactttctccacaatctaaatggaatgtcagtttcctcctgttcctgtccatccgcacccactatcttcatgttgttgcagatgaagcgcgcaagaccgtctgaagataccttcaaccccgtgtatccatatgacacggaaaccggtcctccaactgtgccttttcttactcctccctttgtatcccccaatgggtttcaagagagtccccctggggtactctctttgcgcctatccgaacctctagttacctccaatggcatgcttgcgctcaaaatgggcaacggcctctctctggacgaggccggcaaccttacctcccaaaatgtaaccactgtgagcccacctctcaaaaaaaccaagtcaaacataaacctggaaatatctgcacccctcacagttacctcagaagccctaactgtggctgccgccgcacctctaatggtcgcgggcaacacactcaccatgcaatcacaggccccgctaaccgtgcacgactccaaacttagcattgccacccaaggacccctcacagtgtcagaaggaaagctagccctgcaaacatcaggccccctcaccaccaccgatagcagtacccttactatcactgcctcaccccctctaactactgccactggtagcttgggcattgacttgaaagagcccatttatacacaaaatggaaaactaggactaaagtacggggctcctttgcatgtaacagacgacctaaacactttgaccgtagcaactggtccaggtgtgactattaataatacttccttgcaaactaaagttactggagccttgggttttgattcacaaggcaatatgcaacttaatgtagcaggaggactaaggattgattctcaaaacagacgccttatacttgatgttagttatccgtttgatgctcaaaaccaactaaatctaagactaggacagggccctctttttataaactcagcccacaacttggatattaactacaacaaaggcctttacttgtttacagcttcaaacaattccaaaaagcttgaggttaacctaagcactgccaaggggttgatgtttgacgctacagccatagccattaatgcaggagatgggcttgaatttggttcacctaatgcaccaaacacaaatcccctcaaaacaaaaattggccatggcctagaatttgattcaaacaaggctatggttcctaaactaggaactggccttagttttgacagcacaggtgccattacagtaggaaacaaaaataatgataagctaactttgtggaccacaccagctccatctcctaactgtagactaaatgcagagaaagatgctaaactcactttggtcttaacaaaatgtggcagtcaaatacttgctacagtttcagttttggctgttaaaggcagtttggctccaatatctggaacagttcaaagtgctcatcttattataagatttgacgaaaatggagtgctactaaacaattccttcctggacccagaatattggaactttagaaatggagatcttactgaaggcacagcctatacaaacgctgttggatttatgcctaacctatcagcttatccaaaatctcacggtaaaactgccaaaagtaacattgtcagtcaagtttacttaaacggagacaaaactaaacctgtaacactaaccattacactaaacggtacacaggaaacaggagacacaactccaagtgcatactctatgtcattttcatgggactggtctggccacaactacattaatgaaatatttgccacatcctcttacactttttcatacattgcccaagaataaagaatcgtttgtgttatgtttcaacgtgtttatttttcaattgcagaaaatttcgaatcatttttcattcagtagtatagccccaccaccacatagcttatacagatcaccgtaccttaatcaaactcacagaaccctagtattcaacctgccacctccctcccaacacacagagtacacagtcctttctccccggctggccttaaaaagcatcatatcatgggtaacagacatattcttaggtgttatattccacacggtttcctgtcgagccaaacgctcatcagtgatattaataaactccccgggcagctcacttaagttcatgtcgctgtccagctgctgagccacaggctgctgtccaacttgcggttgcttaacgggcggcgaaggagaagtccacgcctacatgggggtagagtcataatcgtgcatcaggatagggcggtggtgctgcagcagcgcgcgaataaactgctgccgccgccgctccgtcctgcaggaatacaacatggcagtggtctcctcagcgatgattcgcaccgcccgcagcataaggcgccttgtcctccgggcacagcagcgcaccctgatctcacttaaatcagcacagtaactgcagcacagcaccacaatattgttcaaaatcccacagtgcaaggcgctgtatccaaagctcatggcggggaccacagaacccacgtggccatcataccacaagcgcaggtagattaagtggcgacccctcataaacacgctggacataaacattacctcttttggcatgttgtaattcaccacctcccggtaccatataaacctctgattaaacatggcgccatccaccaccatcctaaaccagctggccaaaacctgcccgccggctatacactgcagggaaccgggactggaacaatgacagtggagagcccaggactcgtaaccatggatcatcatgctcgtcatgatatcaatgttggcacaacacaggcacacgtgcatacacttcctcaggattacaagctcctcccgcgttagaaccatatcccagggaacaacccattcctgaatcagcgtaaatcccacactgcagggaagacctcgcacgtaactcacgttgtgcattgtcaaagtgttacattcgggcagcagcggatgatcctccagtatggtagcgcgggtttctgtctcaaaaggaggtagacgatccctactgtacggagtgcgccgagacaaccgagatcgtgttggtcgtagtgtcatgccaaatggaacgccggacgtagtcatatttcctgaagcaaaaccaggtgcgggcgtgacaaacagatctgcgtctccggtctcgccgcttagatcgctctgtgtagtagttgtagtatatccactctctcaaagcatccaggcgccccctggcttcgggttctatgtaaactccttcatgcgccgctgccctgataacatccaccaccgcagaataagccacacccagccaacctacacattcgttctgcgagtcacacacgggaggagcgggaagagctggaagaaccatgtttttttttttattccaaaagattatccaaaacctcaaaatgaagatctattaagtgaacgcgctcccctccggtggcgtggtcaaactctacagccaaagaacagataatggcatttgtaagatgttgcacaatggcttccaaaaggcaaacggccctcacgtccaagtggacgtaaaggctaaacccttcagggtgaatctcctctataaacattccagcaccttcaaccatgcccaaataattctcatctcgccaccttctcaatatatctctaagcaaatcccgaatattaagtccggccattgtaaaaatctgctccagagcgccctccaccttcagcctcaagcagcgaatcatgattgcaaaaattcaggttcctcacagacctgtataagattcaaaagcggaacattaacaaaaataccgcgatcccgtaggtcccttcgcagggccagctgaacataatcgtgcaggtctgcacggaccagcgcggccacttccccgccaggaaccttgacaaaagaacccacactgattatgacacgcatactcggagctatgctaaccagcgtagccccgatgtaagctttgttgcatgggcggcgatataaaatgcaaggtgctgctcaaaaaatcaggcaaagcctcgcgcaaaaaagaaagcacatcgtagtcatgctcatgcagataaaggcaggtaagctccggaaccaccacagaaaaagacaccatttttctctcaaacatgtctgcgggtttctgcataaacacaaaataaaataacaaaaaaacatttaaacattagaagcctgtcttacaacaggaaaaacaacccttataagcataagacggactacggccatgccggcgtgaccgtaaaaaaactggtcaccgtgattaaaaagcaccaccgacagctcctcggtcatgtccggagtcataatgtaagactcggtaaacacatcaggttgattcacatcggtcagtgctaaaaagcgaccgaaatagcccgggggaatacatacccgcaggcgtagagacaacattacagcccccataggaggtataacaaaattaataggagagaaaaacacataaacacctgaaaaaccctcctgcctaggcaaaatagcaccctcccgctccagaacaacatacagcgcttccacagcggcagccataacagtcagccttaccagtaaaaaagaaaacctattaaaaaaacaccactcgacacggcaccagctcaatcagtcacagtgtaaaaaagggccaagtgcagagcgagtatatataggactaaaaaatgacgtaacggttaaagtccacaaaaaacacccagaaaaccgcacgcgaacctacgcccagaaacgaaagccaaaaaacccacaacttcctcaaatcgtcacttccgttttcccacgttacgtcacttcccattttaagaaaactacaattcccaacacatacaagttactccgccctaaaacctacgtcacccgccccgttcccacgccccgcgccacgtcacaaactccaccccctcattatcatattggcttcaatccaaaataaggtatattattgatgatgttaattaatttaaatccgcatgcgatatcgagctctcccgggaattcggatctgcgacgcgaggctggatggccttccccattatgattcttctcgcttccggcggcatcgggatgcccgcgttgcaggccatgctgtccaggcaggtagatgacgaccatcagggacagcttcacggccagcaaaaggccaggaaccgtaaaaaggccgcgttgctggcgtttttccataggctccgcccccctgacgagcatcacaaaaatcgacgctcaagtcagaggtggcgaaacccgacaggactataaagataccaggcgtttccccctggaagctccctcgtgcgctctcctgttccgaccctgccgcttaccggatacctgtccgcctttctcccttcgggaagcgtggcgctttctcaatgctcacgctgtaggtatctcagttcggtgtaggtcgttcgctccaagctgggctgtgtgcacgaaccccccgttcagcccgaccgctgcgccttatccggtaactatcgtcttgagtccaacccggtaagacacgacttatcgccactggcagcagccactggtaacaggattagcagagcgaggtatgtaggcggtgctacagagttcttgaagtggtggcctaactacggctacactagaaggacagtatttggtatctgcgctctgctgaagccagttaccttcggaaaaagagttggtagctcttgatccggcaaacaaaccaccgctggtagcggtggtttttttgtttgcaagcagcagattacgcgcagaaaaaaaggatctcaagaagatcctttgatcttttctacggggtctgacgctcagtggaacgaaaactcacgttaagggattttggtcatgagattatcaaaaaggatcttcacctagatccttttaaatcaatctaaagtatatatgagtaaacttggtctgacagttaccaatgcttaatcagtgaggcacctatctcagcgatctgtctatttcgttcatccatagttgcctgactccccgtcgtgtagataactacgatacgggagggcttaccatctggccccagtgctgcaatgataccgcgagacccacgctcaccggctccagatttatcagcaataaaccagccagccggaagggccgagcgcagaagtggtcctgcaactttatccgcctccatccagtctattaattgttgccgggaagctagagtaagtagttcgccagttaatagtttgcgcaacgttgttgccattgctgcaggcatcgtggtgtcacgctcgtcgtttggtatggcttcattcagctccggttcccaacgatcaaggcgagttacatgatcccccatgttgtgcaaaaaagcggttagctccttcggtcctccgatcgttgtcagaagtaagttggccgcagtgttatcactcatggttatggcagcactgcataattctcttactgtcatgccatccgtaagatgcttttctgtgactggtgagtactcaaccaagtcattctgagaatagtgtatgcggcgaccgagttgctcttgcccggcgtcaacacgggataataccgcgccacatagcagaactttaaaagtgctcatcattggaaaacgttcttcggggcgaaaactctcaaggatcttaccgctgttgagatccagttcgatgtaacccactcgtgcacccaactgatcttcagcatcttttactttcaccagcgtttctgggtgagcaaaaacaggaaggcaaaatgccgcaaaaaagggaataagggcgacacggaaatgttgaatactcatactcttcctttttcaatattattgaagcatttatcagggttattgtctcatgagcggatacatatttgaatgtatttagaaaaataaacaaataggggttccgcgcacatttccccgaaaagtgccacctgacgtctaagaaaccattattatcatgacattaacctataaaaataggcgtatcacgaggccctttcgtcttcaaggatccgaattcccgggagagctcgatatcgcatgcggatttaaattaattaa

SEQ ID NO: 116 - DNA, 20433 bp, Artificial Sequence
  Construct in MV(Schwarz)
accaaacaaagttgggtaaggatagttcaatcaatgatcatcttctagtgcacttaggattcaagatcctattatcagggacaagagcaggattagggatatctcgaggcgcgtgccaccatgcccatggggtctctgcaaccgctggccaccttgtacctgctggggatgctggtcgcttcctgcctcggaggcgttcgactttgggctacaagacaggcaatgctgggccaggtccatgaggttcctgaggggtggctcattttcgtggccgagcaggaggagctgtatgttcgcgtgcaaaacggctttaggaaggtccagctggaagcgcggacacctttgcccaggggaaccgataacgagggatccggcatgtttgcgcagctggtggcccaaaatgttctgctgatcgatgggcccctgagctggtacagtgacccaggcctggcaggcgtgtccctgacggggggcctgagctacaaagaggacacgaaggagctggtggtggccaaggctggagtctactatgtcttctttcaactagagctgcggcgcgtggtggccggcgagggctcaggctccgtttcacttgcgctgcacctgcagccactgcgctctgctgctggggccgccgccctggctttgaccgtggacctgccacccgcctcctccgaggctcggaactcggccttcggtttccagggccgcttgctgcacctgagtgccggccagcgcctgggcgtccatcttcacactgaggccagggcacgccatgcctggcagcttacccagggcgccacagtcttgggactcttccgggtgaccccctaaacgcgccatccatcattgttataaaaaacttaggattcaagatcctattatcagggacaagagcaggattagggatatccgagatggccacacttttaaggagcttagcattgttcaaaagaaacaaggacaaaccacccattacatcaggatccggtggagccatcagaggaatcaaacacattattatagtaccaatccctggagattcctcaattaccactcgatccagacttctggaccggttggtgaggttaattggaaacccggatgtgagcgggcccaaactaacaggggcactaataggtatattatccttatttgtggagtctccaggtcaattgattcagaggatcaccgatgaccctgacgttagcataaggctgttagaggttgtccagagtgaccagtcacaatctggccttaccttcgcatcaagaggtaccaacatggaggatgaggcggaccaatacttttcacatgatgatccaattagtagtgatcaatccaggttcggatggttcgggaacaaggaaatctcagatattgaagtgcaagaccctgagggattcaacatgattctgggtaccatcctagcccaaatttgggtcttgctcgcaaaggcggttacggccccagacacggcagctgattcggagctaagaaggtggataaagtacacccaacaaagaagggtagttggtgaatttagattggagagaaaatggttggatgtggtgaggaacaggattgccgaggacctctccttacgccgattcatggtcgctctaatcctggatatcaagagaacacccggaaacaaacccaggattgctgaaatgatatgtgacattgatacatatatcgtagaggcaggattagccagttttatcctgactattaagtttgggatagaaactatgtatcctgctcttggactgcatgaatttgctggtgagttatccacacttgagtccttgatgaacctttaccagcaaatgggggaaactgcaccctacatggtaatcctggagaactcaattcagaacaagttcagtgcaggatcataccctctgctctggagctatgccatgggagtaggagtggaacttgaaaactccatgggaggtttgaactttggccgatcttactttgatccagcatattttagattagggcaagagatggtaaggaggtcagctggaaaggtcagttccacattggcatctgaactcggtatcactgccgaggatgcaaggcttgtttcagagattgcaatgcatactactgaggacaagatcagtagagcggttggacccagacaagcccaagtatcatttctacacggtgatcaaagtgagaatgagctaccgagattggggggcaaggaagataggagggtcaaacagagtcgaggagaagccagggagagctacagagaaaccgggcccagcagagcaagtgatgcgagagctgcccatcttccaaccggcacacccctagacattgacactgcaacggagtccagccaagatccgcaggacagtcgaaggtcagctgacgccctgcttaggctgcaagccatggcaggaatctcggaagaacaaggctcagacacggacacccctatagtgtacaatgacagaaatcttctagactaggtgcgagaggccgagggccagaacaacatccgcctaccatccatcattgttataaaaaacttaggaaccaggtccacacagccgccagcccatcaaccatccactcccacgattggagccaatggcagaagagcaggcacgccatgtcaaaaacggactggaatgcatccgggctctcaaggccgagcccatcggctcactggccatcgaggaagctatggcagcatggtcagaaatatcagacaacccaggacaggagcgagccacctgcagggaagagaaggcaggcagttcgggtctcagcaaaccatgcctctcagcaattggatcaactgaaggcggtgcacctcgcatccgcggtcagggacctggagagagcgatgacgacgctgaaactttgggaatccccccaagaaatctccaggcatcaagcactgggttacagtgttattacgtttatgatcacagcggtgaagcggttaagggaatccaagatgctgactctatcatggttcaatcaggccttgatggtgatagcaccctctcaggaggagacaatgaatctgaaaacagcgatgtggatattggcgaacctgataccgagggatatgctatcactgaccggggatctgctcccatctctatggggttcagggcttctgatgttgaaactgcagaaggaggggagatccacgagctcctgagactccaatccagaggcaacaactttccgaagcttgggaaaactctcaatgttcctccgcccccggaccccggtagggccagcacttccgggacacccattaaaaagggcacagacgcgagattagcctcatttggaacggagatcgcgtctttattgacaggtggtgcaacccaatgtgctcgaaagtcaccctcggaaccatcagggccaggtgcacctgcggggaatgtccccgagtgtgtgagcaatgccgcactgatacaggagtggacacccgaatctggtaccacaatctccccgagatcccagaataatgaagaagggggagactattatgatgatgagctgttctctgatgtccaagatattaaaacagccttggccaaaatacacgaggataatcagaagataatctccaagctagaatcactgctgttattgaagggagaagttgagtcaattaagaagcagatcaacaggcaaaatatcagcatatccaccctggaaggacacctctcaagcatcatgatcgccattcctggacttgggaaggatcccaacgaccccactgcagatgtcgaaatcaatcccgacttgaaacccatcataggcagagattcaggccgagcactggccgaagttctcaagaaacccgttgccagccgacaactccaaggaatgacaaatggacggaccagttccagaggacagctgctgaaggaatttcagctaaagccgatcgggaaaaagatgagctcagccgtcgggtttgttcctgacaccggccctgcatcacgcagtgtaatccgctccattataaaatccagccggctagaggaggatcggaagcgttacctgatgactctccttgatgatatcaaaggagccaatgatcttgccaagttccaccagatgctgatgaagataataatgaagtagctacagctcaacttacctgccaaccccatgccagtcgacccaactagtacaacctaaatccattataaaaaacttaggagcaaagtgattgcctcccaaggtccacaatgacagagacctacgacttcgacaagtcggcatgggacatcaaagggtcgatcgctccgatacaacccaccacctacagtgatggcaggctggtgccccaggtcagagtcatagatcctggtctaggcgacaggaaggatgaatgctttatgtacatgtttctgctgggggttgttgaggacagcgattccctagggcctccaatcgggcgagcatttgggttcctgcccttaggtgttggcagatccacagcaaagcccgaaaaactcctcaaagaggccactgagcttgacatagttgttagacgtacagcagggctcaatgaaaaactggtgttctacaacaacaccccactaactctcctcacaccttggagaaaggtcctaacaacagggagtgtcttcaacgcaaaccaagtgtgcaatgcggttaatctgataccgctcgataccccgcagaggttccgtgttgtttatatgagcatcacccgtctttcggataacgggtattacaccgttcctagaagaatgctggaattcagatcggtcaatgcagtggccttcaacctgctggtgacccttaggattgacaaggcgataggccctgggaagatcatcgacaatacagagcaacttcctgaggcaacatttatggtccacatcgggaacttcaggagaaagaagagtgaagtctactctgccgattattgcaaaatgaaaatcgaaaagatgggcctggtttttgcacttggtgggatagggggcaccagtcttcacattagaagcacaggcaaaatgagcaagactctccatgcacaactcgggttcaagaagaccttatgttacccgctgatggatatcaatgaagaccttaatcgattactctggaggagcagatgcaagatagtaagaatccaggcagttttgcagccatcagttcctcaagaattccgcatttacgacgacgtgatcataaatgatgaccaaggactattcaaagttctgtagaccgtagtgcccagcaatgcccgaaaacgacccccctcacaatgacagccagaaggcccggacaaaaaagccccctccgaaagactccacggaccaagcgagaggccagccagcagccgacggcaagcgcgaacaccaggcggccccagcacagaacagccctgacacaaggccaccaccagccaccccaatctgcatcctcctcgtgggacccccgaggaccaacccccaaggctgcccccgatccaaaccaccaaccgcatccccaccacccccgggaaagaaacccccagcaattggaaggcccctccccctcttcctcaacacaagaactccacaaccgaaccgcacaagcgaccgaggtgacccaaccgcaggcatccgactccctagacagatcctctctccccggcaaactaaacaaaacttagggccaaggaacatacacacccaacagaacccagaccccggcccacggcgccgcgcccccaacccccgacaaccagagggagcccccaaccaatcccgccggctcccccggtgcccacaggcagggacaccaacccccgaacagacccagcacccaaccatcgacaatccaagacgggggggcccccccaaaaaaaggcccccaggggccgacagccagcaccgcgaggaagcccacccaccccacacacgaccacggcaaccaaaccagaacccagaccaccctgggccaccagctcccagactcggccatcaccccgcagaaaggaaaggccacaacccgcgcaccccagccccgatccggcggggagccacccaacccgaaccagcacccaagagcgatccccgaaggacccccgaaccgcaaaggacatcagtatcccacagcctctccaagtcccccggtctcctcctcttctcgaagggaccaaaagatcaatccaccacacccgacgacactcaactccccacccctaaaggagacaccgggaatcccagaatcaagactcatccaatgtccatcatgggtctcaaggtgaacgtctctgccatattcatggcagtactgttaactctccaaacacccaccggtcaaatccattggggcaatctctctaagataggggtggtaggaataggaagtgcaagctacaaagttatgactcgttccagccatcaatcattagtcataaaattaatgcccaatataactctcctcaataactgcacgagggtagagattgcagaatacaggagactactgagaacagttttggaaccaattagagatgcacttaatgcaatgacccagaatataagaccggttcagagtgtagcttcaagtaggagacacaagagatttgcgggagtagtcctggcaggtgcggccctaggcgttgccacagctgctcagataacagccggcattgcacttcaccagtccatgctgaactctcaagccatcgacaatctgagagcgagcctggaaactactaatcaggcaattgagacaatcagacaagcagggcaggagatgatattggctgttcagggtgtccaagactacatcaataatgagctgataccgtctatgaaccaactatcttgtgatttaatcggccagaagctcgggctcaaattgctcagatactatacagaaatcctgtcattatttggccccagtttacgggaccccatatctgcggagatatctatccaggctttgagctatgcgcttggaggagacatcaataaggtgttagaaaagctcggatacagtggaggtgatttactgggcatcttagagagcggaggcatcaaggcccggataactcacgtcgacacagagtcctacttcattgtcctcagtatagcctatccgacgctgtccgagattaagggggtgattgtccaccggctagagggggtctcgtacaacataggctctcaagagtggtataccactgtgcccaagtatgttgcaacccaagggtaccttatctcgaattttgatgagtcatcgtgtactttcatgccagaggggactgtgtgcagccaaaatgccttgtacccgatgagtcctctgctccaagaatgcctccgggggtacaccaagtcctgtgctcgtacactcgtatccgggtcttttgggaaccggttcattttatcacaagggaacctaatagccaattgtgcatcaatcctttgcaagtgttacacaacaggaacgatcattaatcaagaccctgacaagatcctaacatacattgctgccgatcactgcccggtagtcgaggtgaacggcgtgaccatccaagtcgggagcaggaggtatccagacgctgtgtacttgcacagaattgacctcggtcctcccatatcattggagaggttggacgtagggacaaatctggggaatgcaattgctaagttggaggatgccaaggaattgttggagtcatcggaccagatattgaggagtatgaaaggtttatcgagcactagcatagtctacatcctgattgcagtgtgtcttggagggttgatagggatccccgctttaatatgttgctgcagggggcgttgtaacaaaaagggagaacaagttggtatgtcaagaccaggcctaaagcctgatcttacgggaacatcaaaatcctatgtaaggtcgctctgatcctctacaactcttgaaacacaaatgtcccacaagtctcctcttcgtcatcaagcaaccaccgcacccagcatcaagcccacctgaaattatctccggcttccctctggccgaacaatatcggtagttaatcaaaacttagggtgcaagatcatccacaatgtcaccacaacgagaccggataaatgccttctacaaagataacccccatcccaagggaagtaggatagtcattaacagagaacatcttatgattgatagaccttatgttttgctggctgttctgtttgtcatgtttctgagcttgatcgggttgctagccattgcaggcattagacttcatcgggcagccatctacaccgcagagatccataaaagcctcagcaccaatctagatgtaactaactcaatcgagcatcaggtcaaggacgtgctgacaccactcttcaaaatcatcggtgatgaagtgggcctgaggacacctcagagattcactgacctagtgaaattaatctctgacaagatcaagttccttaatccggatagggagtacgacttcagagatctcacttggtgtatcaacccgccagagagaatcaaattggattatgatcaatactgtgcagatgtggctgctgaagagctcatgaatgcattggtgaactcaactctactggagaccagaacaaccaatcagttcctagctgtctcaaagggaaactgctcagggcccactacaatcagaggtcaattctcaaacatgtcgctgtccctgttagacttgtatttaggtcgaggttacaatgtgtcatctatagtcactatgacatcccagggaatgtatgggggaacttacctagtggaaaagcctaatctgagcagcaaaaggtcagagttgtcacaactgagcatgtaccgagtgtttgaagtaggtgttatcagaaatccgggtttgggggctccggtgttccatatgacaaactatcttgagcaaccagtcagtaatgatctcagcaactgtatggtggctttgggggagctcaaactcgcagccctttgtcacggggaagattctatcacaattccctatcagggatcagggaaaggtgtcagcttccagctcgtcaagctaggtgtctggaaatccccaaccgacatgcaatcctgggtccccttatcaacggatgatccagtgatagacaggctttacctctcatctcacagaggtgttatcgctgacaatcaagcaaaatgggctgtcccgacaacacgaacagatgacaagttgcgaatggagacatgcttccaacaggcgtgtaagggtaaaatccaagcactctgcgagaatcccgagtgggcaccattgaaggataacaggattccttcatacggggtcttgtctgttgatctgagtctgacagttgagcttaaaatcaaaattgcttcgggattcgggccattgatcacacacggttcagggatggacctatacaaatccaaccacaacaatgtgtattggctgactatcccgccaatgaagaacctagccttaggtgtaatcaacacattggagtggataccgagattcaaggttagtccctacctcttcactgtcccaattaaggaagcaggcgaagactgccatgccccaacatacctacctgcggaggtggatggtgatgtcaaactcagttccaatctggtgattctacctggtcaagatctccaatatgttttggcaacctacgatacttccagggttgaacatgctgtggtttattacgtttacagcccaagccgctcattttcttacttttatccttttaggttgcctataaagggggtccccatcgaattacaagtggaatgcttcacatgggaccaaaaactctggtgccgtcacttctgtgtgcttgcggactcagaatctggtggacatatcactcactctgggatggtgggcatgggagtcagctgcacagtcacccgggaagatggaaccaatcgcagatagggctgctagtgaaccaatcacatgatgtcacccagacatcaggcatacccactagtgtgaaatagacatcagaattaagaaaaacgtagggtccaagtggttccccgttatggactcgctatctgtcaaccagatcttataccctgaagttcacctagatagcccgatagttaccaataagatagtagccatcctggagtatgctcgagtccctcacgcttacagcctggaggaccctacactgtgtcagaacatcaagcaccgcctaaaaaacggattttccaaccaaatgattataaacaatgtggaagttgggaatgtcatcaagtccaagcttaggagttatccggcccactctcatattccatatccaaattgtaatcaggatttatttaacatagaagacaaagagtcaacgaggaagatccgtgaactcctcaaaaaggggaattcgctgtactccaaagtcagtgataaggttttccaatgcttaagggacactaactcacggcttggcctaggctccgaattgagggaggacatcaaggagaaagttattaacttgggagtttacatgcacagctcccagtggtttgagccctttctgttttggtttacagtcaagactgagatgaggtcagtgattaaatcacaaacccatacttgccataggaggagacacacacctgtattcttcactggtagttcagttgagttgctaatctctcgtgaccttgttgctataatcagtaaagagtctcaacatgtatattacctgacatttgaactggttttgatgtattgtgatgtcatagaggggaggttaatgacagagaccgctatgactattgatgctaggtatacagagcttctaggaagagtcagatacatgtggaaactgatagatggtttcttccctgcactcgggaatccaacttatcaaattgtagccatgctggagcctctttcacttgcttacctgcagctgagggatataacagtagaactcagaggtgctttccttaaccactgctttactgaaatacatgatgttcttgaccaaaacgggttttctgatgaaggtacttatcatgagttaactgaagctctagattacattttcataactgatgacatacatctgacaggggagattttctcatttttcagaagtttcggccaccccagacttgaagcagtaacggctgctgaaaatgttaggaaatacatgaatcagcctaaagtcattgtgtatgagactctgatgaaaggtcatgccatattttgtggaatcataatcaacggctatcgtgacaggcacggaggcagttggccaccgctgaccctccccctgcatgctgcagacacaatccggaatgctcaagcttcaggtgaagggttaacacatgagcagtgcgttgataactggaaatcttttgctggagtgaaatttggctgctttatgcctcttagcctggatagtgatctgacaatgtacctaaaggacaaggcacttgctgctctccaaagggaatgggattcagtttacccgaaagagttcctgcgttacgaccctcccaagggaaccgggtcacggaggcttgtagatgttttccttaatgattcgagctttgacccatatgatgtgataatgtatgttgtaagtggagcttacctccatgaccctgagttcaacctgtcttacagcctgaaagaaaaggagatcaaggaaacaggtagactttttgctaaaatgacttacaaaatgagggcatgccaagtgattgctgaaaatctaatctcaaacgggattggcaaatattttaaggacaatgggatggccaaggatgagcacgatttgactaaggcactccacactctagctgtctcaggagtccccaaagatctcaaagaaagtcacaggggggggccagtcttaaaaacctactcccgaagcccagtccacacaagtaccaggaacgtgagagcagcaaaagggtttatagggttccctcaagtaattcggcaggaccaagacactgatcatccggagaatatggaagcttacgagacagtcagtgcatttatcacgactgatctcaagaagtactgccttaattggagatatgagaccatcagcttgtttgcacagaggctaaatgagatttacggattgccctcatttttccagtggctgcataagaggcttgagacctctgtcctgtatgtaagtgaccctcattgcccccccgaccttgacgcccatatcccgttatataaagtccccaatgatcaaatcttcattaagtaccctatgggaggtatagaagggtattgtcagaagctgtggaccatcagcaccattccctatctatacctggctgcttatgagagcggagtaaggattgcttcgttagtgcaaggggacaatcagaccatagccgtaacaaaaagggtacccagcacatggccctacaaccttaagaaacgggaagctgctagagtaactagagattactttgtaattcttaggcaaaggctacatgatattggccatcacctcaaggcaaatgagacaattgtttcatcacatttttttgtctattcaaaaggaatatattatgatgggctacttgtgtcccaatcactcaagagcatcgcaagatgtgtattctggtcagagactatagttgatgaaacaagggcagcatgcagtaatattgctacaacaatggctaaaagcatcgagagaggttatgaccgttaccttgcatattccctgaacgtcctaaaagtgatacagcaaattctgatctctcttggcttcacaatcaattcaaccatgacccgggatgtagtcatacccctcctcacaaacaacgacctcttaataaggatggcactgttgcccgctcctattggggggatgaattatctgaatatgagcaggctgtttgtcagaaacatcggtgatccagtaacatcatcaattgctgatctcaagagaatgattctcgcctcactaatgcctgaagagaccctccatcaagtaatgacacaacaaccgggggactcttcattcctagactgggctagcgacccttactcagcaaatcttgtatgtgtccagagcatcactagactcctcaagaacataactgcaaggtttgtcctgatccatagtccaaacccaatgttaaaaggattattccatgatgacagtaaagaagaggacgagggactggcggcattcctcatggacaggcatattatagtacctagggcagctcatgaaatcctggatcatagtgtcacaggggcaagagagtctattgcaggcatgctggataccacaaaaggcttgattcgagccagcatgaggaagggggggttaacctctcgagtgataaccagattgtccaattatgactatgaacaattcagagcagggatggtgctattgacaggaagaaagagaaatgtcctcattgacaaagagtcatgttcagtgcagctggcgagagctctaagaagccatatgtgggcgaggctagctcgaggacggcctatttacggccttgaggtccctgatgtactagaatctatgcgaggccaccttattcggcgtcatgagacatgtgtcatctgcgagtgtggatcagtcaactacggatggttttttgtcccctcgggttgccaactggatgatattgacaaggaaacatcatccttgagagtcccatatattggttctaccactgatgagagaacagacatgaagcttgccttcgtaagagccccaagtcgatccttgcgatctgctgttagaatagcaacagtgtactcatgggcttacggtgatgatgatagctcttggaacgaagcctggttgttggctaggcaaagggccaatgtgagcctggaggagctaagggtgatcactcccatctcaacttcgactaatttagcgcataggttgagggatcgtagcactcaagtgaaatactcaggtacatcccttgtccgagtggcgaggtataccacaatctccaacgacaatctctcatttgtcatatcagataagaaggttgatactaactttatataccaacaaggaatgcttctagggttgggtgttttagaaacattgtttcgactcgagaaagataccggatcatctaacacggtattacatcttcacgtcgaaacagattgttgcgtgatcccgatgatagatcatcccaggatacccagctcccgcaagctagagctgagggcagagctatgtaccaacccattgatatatgataatgcacctttaattgacagagatgcaacaaggctatacacccagagccataggaggcaccttgtggaatttgttacatggtccacaccccaactatatcacattttagctaagtccacagcactatctatgattgacctggtaacaaaatttgagaaggaccatatgaatgaaatttcagctctcataggggatgacgatatcaatagtttcataactgagtttctgctcatagagccaagattattcactatctacttgggccagtgtgcggccatcaattgggcatttgatgtacattatcatagaccatcagggaaatatcagatgggtgagctgttgtcatcgttcctttctagaatgagcaaaggagtgtttaaggtgcttgtcaatgctctaagccacccaaagatctacaagaaattctggcattgtggtattatagagcctatccatggtccttcacttgatgctcaaaacttgcacacaactgtgtgcaacatggtttacacatgctatatgacctacctcgacctgttgttgaatgaagagttagaagagttcacatttctcttgtgtgaaagcgacgaggatgtagtaccggacagattcgacaacatccaggcaaaacacttatgtgttctggcagatttgtactgtcaaccagggacctgcccaccaattcgaggtctaagaccggtagagaaatgtgcagttctaaccgaccatatcaaggcagaggctatgttatctccagcaggatcttcgtggaacataaatccaattattgtagaccattactcatgctctctgacttatctccggcgaggatcgatcaaacagataagattgagagttgatccaggattcattttcgacgccctcgctgaggtaaatgtcagtcagccaaagatcggcagcaacaacatctcaaatatgagcatcaaggctttcagacccccacacgatgatgttgcaaaattgctcaaagatatcaacacaagcaagcacaatcttcccatttcagggggcaatctcgccaattatgaaatccatgctttccgcagaatcgggttgaactcatctgcttgctacaaagctgttgagatatcaacattaattaggagatgccttgagccaggggaggacggcttgttcttgggtgagggatcgggttctatgttgatcacttataaagagatacttaaactaaacaagtgcttctataatagtggggtttccgccaattctagatctggtcaaagggaattagcaccctatccctccgaagttggccttgtcgaacacagaatgggagtaggtaatattgtcaaagtgctctttaacgggaggcccgaagtcacgtgggtaggcagtgtagattgcttcaatttcatagttagtaatatccctacctctagtgtggggtttatccattcagatatagagaccttgcctgacaaagatactatagagaagctagaggaattggcagccatcttatcgatggctctgctcctgggcaaaataggatcaatactggtgattaagcttatgcctttcagcggggattttgttcagggatttataagttatgtagggtctcattatagagaagtgaaccttgtataccctagatacagcaacttcatctctactgaatcttatttggttatgacagatctcaaggctaaccggctaatgaatcctgaaaagattaagcagcagataattgaatcatctgtgaggacttcacctggacttataggtcacatcctatccattaagcaactaagctgcatacaagcaattgtgggagacgcagttagtagaggtgatatcaatcctactctgaaaaaacttacacctatagagcaggtgctgatcaattgcgggttggcaattaacggacctaagctgtgcaaagaattgatccaccatgatgttgcctcagggcaagatggattgcttaattctatactcatcctctacagggagttggcaagattcaaagacaaccaaagaagtcaacaagggatgttccacgcttaccccgtattggtaagtagcaggcaacgagaacttatatctaggatcacccgcaaattctgggggcacattcttctttactccgggaacaaaaagttgataaataagtttatccagaatctcaagtccggctatctgatactagacttacaccagaatatcttcgttaagaatctatccaagtcagagaaacagattattatgacggggggtttgaaacgtgagtgggtttttaaggtaacagtcaaggagaccaaagaatggtataagttagtcggatacagtgccctgattaaggactaattggttgaactccggaaccctaatcctgccctaggtggttaggcattatttgcaatatattaaagaaaactttgaaaatacgaagtttctattcccagctttgtctggtggccggcatggtcccagcctcctcgctggcgccggctgggcaacattccgaggggaccgtcccctcggtaatggcgaatgggacgcggccggtcgatcgacgatccggctgctaacaaagcccgaaaggaagctgagttggctgctgccaccgctgagcaataactagcataaccccttggggcctctaaacgggtcttgaggggttttttgctgaaaggaggaactatatccggatcgagatcaattctgtgagcgtatggcaaacgaaggaaaaatagttatagtagccgcactcgatgggacatttcaacgtaaaccgtttaataatattttgaatcttattccattatctgaaatggtggtaaaactaactgctgtgtgtatgaaatgctttaaggaggcttccttttctaaacgattgggtgaggaaaccgagatagaaataataggaggtaatgatatgtatcaatcggtgtgtagaaagtgttacatcgactcataatattatattttttatctaaaaaactaaaaataaacattgattaaattttaatataatacttaaaaatggatgttgtgtcgttagataaaccgtttatgtattttgaggaaattgataatgagttagattacgaaccagaaagtgcaaatgaggtcgcaaaaaaactgccgtatcaaggacagttaaaactattactaggagaattattttttcttagtaagttacagcgacacggtatattagatggtgccaccgtagtgtatataggatctgctcccggtacacatatacgttatttgagagatcatttctataatttaggagtgatcccgaaaggaagctgagttggctgctgccaccgctgagcaataactagcataaccccttggggcctctaaacgggtcttgaggggttttttgctgaaaggaggaacgcgcctgatgcggtattttctccttacgcatctgtgcggtatttcacaccgcatatatggtgcactctcagtacaatctgctctgatgccgcatagttaagccagccccgacacccgccaacacccgctgacgcgccctgacgggcttgtctgctcccggcatccgcttacagacaagctgtgaccgtctccgggagctgcatgtgtcagaggttttcaccgtcatcaccgaaacgcgcgagacgaaagggcctcgtgatacgcctatttttataggttaatgtcatgataataatggtttcttagacgtcaggtggcacttttcggggaaatgtgcgcggaacccctatttgtttatttttctaaatacattcaaatatgtatccgctcatgagacaataaccctgataaatgcttcaataatattgaaaaaggaagagtatgagtattcaacatttccgtgtcgcccttattcccttttttgcggcattttgccttcctgtttttgctcacccagaaacgctggtgaaagtaaaagatgctgaagatcagttgggtgcacgagtgggttacatcgaactggatctcaacagcggtaagatccttgagagttttcgccccgaagaacgttttccaatgatgagcacttttaaagttctgctatgtggcgcggtattatcccgtattgacgccgggcaagagcaactcggtcgccgcatacactattctcagaatgacttggttgagtactcaccagtcacagaaaagcatcttacggatggcatgacagtaagagaattatgcagtgctgccataaccatgagtgataacactgcggccaacttacttctgacaacgatcggaggaccgaaggagctaaccgcttttttgcacaacatgggggatcatgtaactcgccttgatcgttgggaaccggagctgaatgaagccataccaaacgacgagcgtgacaccacgatgcctgtagcaatggcaacaacgttgcgcaaactattaactggcgaactacttactctagcttcccggcaacaattaatagactggatggaggcggataaagttgcaggaccacttctgcgctcggcccttccggctggctggtttattgctgataaatctggagccggtgagcgtgggtctcgcggtatcattgcagcactggggccagatggtaagccctcccgtatcgtagttatctacacgacggggagtcaggcaactatggatgaacgaaatagacagatcgctgagataggtgcctcactgattaagcattggtaactgtcagaccaagtttactcatatatactttagattgatttaaaacttcatttttaatttaaaaggatctaggtgaagatcctttttgataatctcatgaccaaaatcccttaacgtgagttttcgttccactgagcgtcagaccccgtagaaaagatcaaaggatcttcttgagatcctttttttctgcgcgtaatctgctgcttgcaaacaaaaaaaccaccgctaccagcggtggtttgtttgccggatcaagagctaccaactctttttccgaaggtaactggcttcagcagagcgcagataccaaatactgtccttctagtgtagccgtagttaggccaccacttcaagaactctgtagcaccgcctacatacctcgctctgctaatcctgttaccagtggctgctgccagtggcgataagtcgtgtcttaccgggttggactcaagacgatagttaccggataaggcgcagcggtcgggctgaacggggggttcgtgcacacagcccagcttggagcgaacgacctacaccgaactgagatacctacagcgtgagcattgagaaagcgccacgcttcccgaagggagaaaggcggacaggtatccggtaagcggcagggtcggaacaggagagcgcacgagggagcttccagggggaaacgcctggtatctttatagtcctgtcgggtttcgccacctctgacttgagcgtcgatttttgtgatgctcgtcaggggggcggagcctatggaaaaacgccagcaacgcggcctttttacggttcctggccttttgctggccttttgctcacatgttctttcctgcgttatcccctgattctgtggataaccgtattaccgcctttgagtgagctgataccgctcgccgcagccgaacgaccgagcgcagcgagtcagtgagcgaggaagcggaagagcgcccaatacgcaaaccgcctctccccgcgcgttggccgattcattaatgcagctggcacgacaggtttcccgactggaaagcgggcagtgagcgcaacgcaattaatgtgagttagctcactcattaggcaccccaggctttacactttatgcttccggctcgtatgttgtgtggaattgtgagcggataacaatttcacacaggaaacagctatgaccatgattacgccaagcttacgcgtcctggcattatgcccagtacatgaccttatgggactttcctacttggcagtacatctacgtattagtcatcgctattaccatggtgatgcggttttggcagtacatcaatgggcgtggatagcggtttgactcacggggatttccaagtctccaccccattgacgtcaatgggagtttgttttggcaccaaaatcaacgggactttccaaaatgtcgtaacaactccgccccattgacgcaaatgggcggtaggcgtgtacggtgggaggtctatataagcagagctcgtttagtgaaccgtgg

SEQ ID NO: 117 - DNA, 10972 bp, Artificial Sequence
  Construct in pCEP4 vector
gttgacattgattattgactagttattaatagtaatcaattacggggtcattagttcatagcccatatatggagttccgcgttacataacttacggtaaatggcccgcctggctgaccgcccaacgacccccgcccattgacgtcaataatgacgtatgttcccatagtaacgccaatagggactttccattgacgtcaatgggtggagtatttacggtaaactgcccacttggcagtacatcaagtgtatcatatgccaagtccgccccctattgacgtcaatgacggtaaatggcccgcctggcattatgcccagtacatgaccttacgggactttcctacttggcagtacatctacgtattagtcatcgctattaccatggtgatgcggttttggcagtacaccaatgggcgtggatagcggtttgactcacggggatttccaagtctccaccccattgacgtcaatgggagtttgttttggcaccaaaatcaacgggactttccaaaatgtcgtaataaccccgccccgttgacgcaaatgggcggtaggcgtgtacggtgggaggtctatataagcagagctcgtttagtgaaccgtcagatctctagaagctgggtaccagctgctagcaagcttgccaccatgcccatggggtctctgcaaccgctggccaccttgtacctgctggggatgctggtcgcttcctgcctcggaggctctggctccaactggagccacccccagttcgagaagggaggttctgggggccatcaccatcaccatcacggcggttcagggggaggcgttcgactttgggctacaagacaggcaatgctgggccaggtccatgaggttcctgaggggtggctcattttcgtggccgagcaggaggagctgtatgttcgcgtgcaaaacggctttaggaaggtccagctggaagcgcggacacctttgcccaggggaaccgataacgagggatccggcatgtttgcgcagctggtggcccaaaatgttctgctgatcgatgggcccctgagctggtacagtgacccaggcctggcaggcgtgtccctgacggggggcctgagctacaaagaggacacgaaggagctggtggtggccaaggctggagtctactatgtcttctttcaactagagctgcggcgcgtggtggccggcgagggctcaggctccgtttcacttgcgctgcacctgcagccactgcgctctgctgctggggccgccgccctggctttgaccgtggacctgccacccgcctcctccgaggctcggaactcggccttcggtttccagggccgcttgctgcacctgagtgccggccagcgcctgggcgtccatcttcacactgaggccagggcacgccatgcctggcagcttacccagggcgccacagtcttgggactcttccgggtgaccccctaagcggccgcagatccagacatgataagatacattgatgagtttggacaaaccacaactagaatgcagtgaaaaaaatgctttatttgtgaaatttgtgatgctattgctttatttgtaaccattataagctgcaataaacaagttaacaacaacaattgcattcattttatgtttcaggttcagggggaggtgtgggaggttttttaaagcaagtaaaacctctacaaatgtggtatggctgattatgatccggctgcctcgcgcgtttcggtgatgacggtgaaaacctctgacacatgcagctcccggagacggtcacagcttgtctgtaagcggatgccgggagcagacaagcccgtcaggcgtcagcgggtgttggcgggtgtcggggcgcagccatgaggtcgactctagaggatcgatgccccgccccggacgaactaaacctgactacgacatctctgccccttcttcgcggggcagtgcatgtaatcccttcagttggttggtacaacttgccaactgggccctgttccacatgtgacacggggggggaccaaacacaaaggggttctctgactgtagttgacatccttataaatggatgtgcacatttgccaacactgagtggctttcatcctggagcagactttgcagtctgtggactgcaacacaacattgcctttatgtgtaactcttggctgaagctcttacaccaatgctgggggacatgtacctcccaggggcccaggaagactacgggaggctacaccaacgtcaatcagaggggcctgtgtagctaccgataagcggaccctcaagagggcattagcaatagtgtttataaggcccccttgttaaccctaaacgggtagcatatgcttcccgggtagtagtatatactatccagactaaccctaattcaatagcatatgttacccaacgggaagcatatgctatcgaattagggttagtaaaagggtcctaaggaacagcgatatctcccaccccatgagctgtcacggttttatttacatggggtcaggattccacgagggtagtgaaccattttagtcacaagggcagtggctgaagatcaaggagcgggcagtgaactctcctgaatcttcgcctgcttcttcattctccttcgtttagctaatagaataactgctgagttgtgaacagtaaggtgtatgtgaggtgctcgaaaacaaggtttcaggtgacgcccccagaataaaatttggacggggggttcagtggtggcattgtgctatgacaccaatataaccctcacaaaccccttgggcaataaatactagtgtaggaatgaaacattctgaatatctttaacaatagaaatccatggggtggggacaagccgtaaagactggatgtccatctcacacgaatttatggctatgggcaacacataatcctagtgcaatatgatactggggttattaagatgtgtcccaggcagggaccaagacaggtgaaccatgttgttacactctatttgtaacaaggggaaagagagtggacgccgacagcagcggactccactggttgtctctaacacccccgaaaattaaacggggctccacgccaatggggcccataaacaaagacaagtggccactcttttttttgaaattgtggagtgggggcacgcgtcagcccccacacgccgccctgcggttttggactgtaaaataagggtgtaataacttggctgattgtaaccccgctaaccactgcggtcaaaccacttgcccacaaaaccactaatggcaccccggggaatacctgcataagtaggtgggcgggccaagataggggcgcgattgctgcgatctggaggacaaattacacacacttgcgcctgagcgccaagcacagggttgttggtcctcatattcacgaggtcgctgagagcacggtgggctaatgttgccatgggtagcatatactacccaaatatctggatagcatatgctatcctaatctatatctgggtagcataggctatcctaatctatatctgggtagcatatgctatcctaatctatatctgggtagtatatgctatcctaatttatatctgggtagcataggctatcctaatctatatctgggtagcatatgctatcctaatctatatctgggtagtatatgctatcctaatctgtatccgggtagcatatgctatcctaatagagattagggtagtatatgctatcctaatttatatctgggtagcatatactacccaaatatctggatagcatatgctatcctaatctatatctgggtagcatatgctatcctaatctatatctgggtagcataggctatcctaatctatatctgggtagcatatgctatcctaatctatatctgggtagtatatgctatcctaatttatatctgggtagcataggctatcctaatctatatctgggtagcatatgctatcctaatctatatctgggtagtatatgctatcctaatctgtatccgggtagcatatgctatcctcatgcatatacagtcagcatatgatacccagtagtagagtgggagtgctatcctttgcatatgccgccacctcccaagggggcgtgaattttcgctgcttgtccttttcctgctggttgctcccattcttaggtgaatttaaggaggccaggctaaagccgtcgcatgtctgattgctcaccaggtaaatgtcgctaatgttttccaacgcgagaaggtgttgagcgcggagctgagtgacgtgacaacatgggtatgcccaattgccccatgttgggaggacgaaaatggtgacaagacagatggccagaaatacaccaacagcacgcatgatgtctactggggatttattctttagtgcgggggaatacacggcttttaatacgattgagggcgtctcctaacaagttacatcactcctgcccttcctcaccctcatctccatcacctccttcatctccgtcatctccgtcatcaccctccgcggcagccccttccaccataggtggaaaccagggaggcaaatctactccatcgtcaaagctgcacacagtcaccctgatattgcaggtaggagcgggctttgtcataacaaggtccttaatcgcatccttcaaaacctcagcaaatatatgagtttgtaaaaagaccatgaaataacagacaatggactcccttagcgggccaggttgtgggccgggtccaggggccattccaaaggggagacgactcaatggtgtaagacgacattgtggaatagcaagggcagttcctcgccttaggttgtaaagggaggtcttactacctccatatacgaacacaccggcgacccaagttccttcgtcggtagtcctttctacgtgactcctagccaggagagctcttaaaccttctgcaatgttctcaaatttcgggttggaacctccttgaccacgatgctttccaaaccaccctccttttttgcgcctgcctccatcaccctgaccccggggtccagtgcttgggccttctcctgggtcatctgcggggccctgctctatcgctcccgggggcacgtcaggctcaccatctgggccaccttcttggtggtattcaaaataatcggcttcccctacagggtggaaaaatggccttctacctggagggggcctgcgcggtggagacccggatgatgatgactgactactgggactcctgggcctcttttctccacgtccacgacctctccccctggctctttcacgacttccccccctggctctttcacgtcctctaccccggcggcctccactacctcctcgaccccggcctccactacctcctcgaccccggcctccactgcctcctcgaccccggcctccacctcctgctcctgcccctcctgctcctgcccctcctcctgctcctgcccctcctgcccctcctgctcctgcccctcctgcccctcctgctcctgcccctcctgcccctcctgctcctgcccctcctgcccctcctcctgctcctgcccctcctgcccctcctcctgctcctgcccctcctgcccctcctgctcctgcccctcctgcccctcctgctcctgcccctcctgcccctcctgctcctgcccctcctgctcctgcccctcctgctcctgcccctcctgctcctgcccctcctgcccctcctgcccctcctcctgctcctgcccctcctgctcctgcccctcctgcccctcctgcccctcctgctcctgcccctcctcctgctcctgcccctcctgcccctcctgcccctcctcctgctcctgcccctcctgcccctcctcctgctcctgcccctcctcctgctcctgcccctcctgcccctcctgcccctcctcctgctcctgcccctcctgcccctcctcctgctcctgcccctcctcctgctcctgcccctcctgcccctcctgcccctcctcctgctcctgcccctcctcctgctcctgcccctcctgcccctcctgcccctcctgcccctcctcctgctcctgcccctcctcctgctcctgcccctcctgctcctgcccctcccgctcctgctcctgctcctgttccaccgtgggtccctttgcagccaatgcaacttggacgtttttggggtctccggacaccatctctatgtcttggccctgatcctgagccgcccggggctcctggtcttccgcctcctcgtcctcgtcctcttccccgtcctcgtccatggttatcaccccctcttctttgaggtccactgccgccggagccttctggtccagatgtgtctcccttctctcctaggccatttccaggtcctgtacctggcccctcgtcagacatgattcacactaaaagagatcaatagacatctttattagacgacgctcagtgaatacagggagtgcagactcctgccccctccaacagcccccccaccctcatccccttcatggtcgctgtcagacagatccaggtctgaaaattccccatcctccgaaccatcctcgtcctcatcaccaattactcgcagcccggaaaactcccgctgaacatcctcaagatttgcgtcctgagcctcaagccaggcctcaaattcctcgtccccctttttgctggacggtagggatggggattctcgggacccctcctcttcctcttcaaggtcaccagacagagatgctactggggcaacggaagaaaagctgggtgcggcctgtgaggatcagcttatcgatgataagctgtcaaacatgagaattcttgaagacgaaagggcctcgtgatacgcctatttttataggttaatgtcatgataataatggtttcttagacgtcaggtggcacttttcggggaaatgtgcgcggaacccctatttgtttatttttctaaatacattcaaatatgtatccgctcatgagacaataaccctgataaatgcttcaataatattgaaaaaggaagagtatgagtattcaacatttccgtgtcgcccttattcccttttttgcggcattttgccttcctgtttttgctcacccagaaacgctggtgaaagtaaaagatgctgaagatcagttgggtgcacgagtgggttacatcgaactggatctcaacagcggtaagatccttgagagttttcgccccgaagaacgttttccaatgatgagcacttttaaagttctgctatgtggcgcggtattatcccgtgttgacgccgggcaagagcaactcggtcgccgcatacactattctcagaatgacttggttgagtactcaccagtcacagaaaagcatcttacggatggcatgacagtaagagaattatgcagtgctgccataaccatgagtgataacactgcggccaacttacttctgacaacgatcggaggaccgaaggagctaaccgcttttttgcacaacatgggggatcatgtaactcgccttgatcgttgggaaccggagctgaatgaagccataccaaacgacgagcgtgacaccacgatgcctgcagcaatggcaacaacgttgcgcaaactattaactggcgaactacttactctagcttcccggcaacaattaatagactggatggaggcggataaagttgcaggaccacttctgcgctcggcccttccggctggctggtttattgctgataaatctggagccggtgagcgtgggtctcgcggtatcattgcagcactggggccagatggtaagccctcccgtatcgtagttatctacacgacggggagtcaggcaactatggatgaacgaaatagacagatcgctgagataggtgcctcactgattaagcattggtaactgtcagaccaagtttactcatatatactttagattgatttaaaacttcatttttaatttaaaaggatctaggtgaagatcctttttgataatctcatgaccaaaatcccttaacgtgagttttcgttccactgagcgtcagaccccgtagaaaagatcaaaggatcttcttgagatcctttttttctgcgcgtaatctgctgcttgcaaacaaaaaaaccaccgctaccagcggtggtttgtttgccggatcaagagctaccaactctttttccgaaggtaactggcttcagcagagcgcagataccaaatactgtccttctagtgtagccgtagttaggccaccacttcaagaactctgtagcaccgcctacatacctcgctctgctaatcctgttaccagtggctgctgccagtggcgataagtcgtgtcttaccgggttggactcaagacgatagttaccggataaggcgcagcggtcgggctgaacggggggttcgtgcacacagcccagcttggagcgaacgacctacaccgaactgagatacctacagcgtgagctatgagaaagcgccacgcttcccgaagggagaaaggcggacaggtatccggtaagcggcagggtcggaacaggagagcgcacgagggagcttccagggggaaacgcctggtatctttatagtcctgtcgggtttcgccacctctgacttgagcgtcgatttttgtgatgctcgtcaggggggcggagcctatggaaaaacgccagcaacgcggcctttttacggttcctggccttttgctggccttgaagctgtccctgatggtcgtcatctacctgcctggacagcatggcctgcaacgcgggcatcccgatgccgccggaagcgagaagaatcataatggggaaggccatccagcctcgcgtcgcgaacgccagcaagacgtagcccagcgcgtcggccccgagatgcgccgcgtgcggctgctggagatggcggacgcgatggatatgttctgccaagggttggtttgcgcattcacagttctccgcaagaattgattggctccaattcttggagtggtgaatccgttagcgaggtgccgccctgcttcatccccgtggcccgttgctcgcgtttgctggcggtgtccccggaagaaatatatttgcatgtctttagttctatgatgacacaaaccccgcccagcgtcttgtcattggcgaattcgaacacgcagatgcagtcggggcggcgcggtccgaggtccacttcgcatattaaggtgacgcgtgtggcctcgaacaccgagcgaccctgcagcgacccgcttaacagcgtcaacagcgtgccgcagatcccggggggcaatgagatatgaaaaagcctgaactcaccgcgacgtctgtcgagaagtttctgatcgaaaagttcgacagcgtctccgacctgatgcagctctcggagggcgaagaatctcgtgctttcagcttcgatgtaggagggcgtggatatgtcctgcgggtaaatagctgcgccgatggtttctacaaagatcgttatgtttatcggcactttgcatcggccgcgctcccgattccggaagtgcttgacattggggaattcagcgagagcctgacctattgcatctcccgccgtgcacagggtgtcacgttgcaagacctgcctgaaaccgaactgcccgctgttctgcagccggtcgcggaggccatggatgcgatcgctgcggccgatcttagccagacgagcgggttcggcccattcggaccgcaaggaatcggtcaatacactacatggcgtgatttcatatgcgcgattgctgatccccatgtgtatcactggcaaactgtgatggacgacaccgtcagtgcgtccgtcgcgcaggctctcgatgagctgatgctttgggccgaggactgccccgaagtccggcacctcgtgcacgcggatttcggctccaacaatgtcctgacggacaatggccgcataacagcggtcattgactggagcgaggcgatgttcggggattcccaatacgaggtcgccaacatcttcttctggaggccgtggttggcttgtatggagcagcagacgcgctacttcgagcggaggcatccggagcttgcaggatcgccgcggctccgggcgtatatgctccgcattggtcttgaccaactctatcagagcttggttgacggcaatttcgatgatgcagcttgggcgcagggtcgatgcgacgcaatcgtccgatccggagccgggactgtcgggcgtacacaaatcgcccgcagaagcgcggccgtctggaccgatggctgtgtagaagtactcgccgatagtggaaaccgacgccccagcactcgtccggatcgggagatgggggaggctaactgaaacacggaaggagacaataccggaaggaacccgcgctatgacggcaataaaaagacagaataaaacgcacgggtgttgggtcgtttgttcataaacgcggggttcggtcccagggctggcactctgtcgataccccaccgagaccccattggggccaatacgcccgcgtttcttccttttccccaccccaccccccaagttcgggtgaaggcccagggctcgcagccaacgtcggggcggcaggccctgccatagccactggccccgtgggttagggacggggtcccccatggggaatggtttatggttcgtgggggttattattttgggcgttgcgtggggtcaggtccacgactggactgagcagacagacccatggtttttggatggcctgggcatggaccgcatgtactggcgcgacacgaacaccgggcgtctgtggctgccaaacacccccgacccccaaaaaccaccgcgcggatttctggcgtgccaagctagtcgaccaattctcatgtttgacagcttatcatcgcagatccgggcaacgttgttgccattgctgcaggcgcagaactggtaggtatggaagatctatacattgaatcaatattggcaattagccatattagtcattggttatatagcataaatcaatattggctattggccattgcatacgttgtatctatatcataatatgtacatttatattggctcatgtccaatatgaccgccat

SEQ ID NO: 118 - DNA, 20433 bp, Artificial Sequence
  Construct in MV(Rubeovax) vector
accaaacaaagttgggtaaggatagttcaatcaatgatcatcttctagtgcacttaggattcaagatcctattatcagggacaagagcaggattagggatatctcgaggcgcgtgccaccatgcccatggggtctctgcaaccgctggccaccttgtacctgctggggatgctggtcgcttcctgcctcggaggcgttcgactttgggctacaagacaggcaatgctgggccaggtccatgaggttcctgaggggtggctcattttcgtggccgagcaggaggagctgtatgttcgcgtgcaaaacggctttaggaaggtccagctggaagcgcggacacctttgcccaggggaaccgataacgagggatccggcatgtttgcgcagctggtggcccaaaatgttctgctgatcgatgggcccctgagctggtacagtgacccaggcctggcaggcgtgtccctgacggggggcctgagctacaaagaggacacgaaggagctggtggtggccaaggctggagtctactatgtcttctttcaactagagctgcggcgcgtggtggccggcgagggctcaggctccgtttcacttgcgctgcacctgcagccactgcgctctgctgctggggccgccgccctggctttgaccgtggacctgccacccgcctcctccgaggctcggaactcggccttcggtttccagggccgcttgctgcacctgagtgccggccagcgcctgggcgtccatcttcacactgaggccagggcacgccatgcctggcagcttacccagggcgccacagtcttgggactcttccgggtgaccccctaaacgcgccatccatcattgttataaaaaacttaggattcaagatcctattatcagggacaagagcaggattagggatatccgagatggccacacttttaaggagcttagcattgttcaaaagaaacaaggacaaaccacccattacatcaggatccggtggagccatcagaggaatcaaacacattattatagtaccaatccctggagattcctcaattaccactcgatccagacttctggaccggttggtcaggttaattggaaacccggatgtgagcgggcccaaactaacaggggcactaataggtatattatccttatttgtggagtctccaggtcaattgattcagaggatcaccgatgaccctgacgttagcataaggctgttagaggttgtccagagtgaccagtcacaatctggccttaccttcgcatcaagaggtaccaacatggaggatgaggcggaccaatacttttcacatgatgatccaattagtagtgatcaatccaggttcggatggttcgagaacaaggaaatctcagatattgaagtgcaagaccctgagggattcaacatgattctgggtaccatcctagcccaaatttgggtcttgctcgcaaaggcggttacggccccagacacggcagctgattcggagctaagaaggtggataaagtacacccaacaaagaagggtggttggtgaatttagattggagagaaaatggttggatgtggtgaggaacaggattgccgaggacctctccttacgccgattcatggtcgctctaatcctggatatcaagagaacacccggaaacaaacccaggattgctgaaatgatatgtgacattgatacatatatcgtagaggcaggattagccagttttatcctgactattaagtttgggatagaaactatgtatcctgctcttggactgcatgaatttgctggtgagttatccacacttgagtccttgatgaacctttaccagcaaatgggggaaactgcaccctacatggtaatcctggagaactcaattcagaacaagttcagtgcaggatcataccctctgctctggagctatgccatgggagtaggagtggaacttgaaaactccatgggaggtttgaactttggccgatcttactttgatccagcatattttagattagggcaagagatggtaaggaggtcagctggaaaggtcagttccacattggcatctgaactcggtatcactgccgaggatgcaaggcttgtttcagagattgcaatgcatactactgaggacaagatcagtagagcggttggacccagacaagcccaagtatcatttctacacggtgatcaaagtgagaatgagctaccgagattggggggcaaggaagataggagggtcaaacagagtcgaggagaagccagggagagctacagagaaaccgggcccagcagagcaagtgatgcgagagctgcccatcttccaaccggcacacccctagacattgacactgcaacggagtccagccaagatccgcaggacagtcgaaggtcagctgacgccctgcttaggctgcaagccatggcaggaatctcggaagaacaaggctcagacacggacacccctatagtgtacaatgacagaaatcttctagactaggtgcgagaggccgagggccagaacaacatccgcctaccctccatcattgttataaaaaacttaggaaccaggtccacacagccgccagcccatcaaccatccactcccacgattggagccaatggcagaagagcaggcacgccatgtcaaaaacggactggaatgcatccgggctctcaaggccgagcccatcggctcactggccatcgaggaagctatggcagcatggtcagaaatatcagacaacccaggacaggagcgagccacctgcagggaagagaaggcaggcagttcgggtctcagcaaaccatgcctctcagcaattggatcaactgaaggcggtgcacctcgcatccgcggtcagggacctggagagagcgatgacgacgctgaaactttgggaatccccccaagaaatctccaggcatcaagcactgggttacagtgttattacgtttatgatcacagcggtgaagcggttaagggaatccaagatgctgactctatcatggttcaatcaggccttgatggtgatagcaccctctcaggaggagacaatgaatctgaaaacagcgatgtggatattggcgaacctgataccgagggatatgctatcactgaccggggatctgctcccatctctatggggttcagggcttctgatgttgaaactgcagaaggaggggagatccacgagctcctgagactccaatccagaggcaacaactttccgaagcttgggaaaactctcaatgttcctccgcccccggaccccggtagggccagcacttccgggacacccattaaaaagggcacagacgcgagattagcctcatttggaacggagatcgcgtctttattgacaggtggtgcaacccaatgtgctcgaaagtcaccctcggaaccatcagggccaggtgcacctgcggggaatgtccccgagtgtgtgagcaatgccgcactgatacaggagtggacacccgaatctggtaccacaatctccccgagatcccagaataatgaagaagggggagactattatgatgatgagctgttctctgatgtccaagatattaaaacagccttggccaaaatacacgaggataatcagaagataatctccaagctagaatcactgctgttattgaagggagaagttgagtcaattaagaagcagatcaacaggcaaaatatcagcatatccaccctggaaggacacctctcaagcatcatgatcgccattcctggacttgggaaggatcccaacgaccccactgcagatgtcgaaatcaatcccgacttgaaacccatcataggcagagattcaggccgagcactggccgaagttctcaagaaacccgttgccagccgacaactccaaggaatgacaaatggacggaccagttccagaggacagctgctgaaggaatttcagctaaagccgatcgggaaaaagatgagctcagccgtcgggtttgttcctgacaccggccctgcatcacgcagtgtaatccgctccattataaaatccagccggctagaggaggatcggaagcgttacctgatgactctccttgatgatatcaaaggagccaatgatcttgccaagttccaccagatgctgatgaagataataatgaagtagctacagctcaacttacctgccaaccccatgccagtcgacccaactagtacaacctaaatccattataaaaaacttaggagcaaagtgattgcctcccaagttccacaatgacagagacctacgacttcgacaagtcggcatgggacatcaaagggtcgatcgctccgatacaacccaccacctacagtgatggcaggctggtgccccaggtcagagtcatagatcctggtctaggcgacaggaaggatgaatgctttatgtacatgtttctgctgggggttgttgaggacagcgattccctagggcctccaatcgggcgagcatttgggtccctgcccttaggtgttggcagatccacagcaaagcccgaaaaactcctcaaagaggccactgagcttgacatagttgttagacgtacagcagggctcaatgaaaaactggtgttctacaacaacaccccactaactctcctcacaccttggagaaaggtcctaacaacagggagtgtcttcaacgcaaaccaagtgtgcaatgcggttaatctgataccgctcgataccccgcagaggttccgtgttgtttatatgagcatcacccgtctttcggataacgggtattacaccgttcctagaagaatgctggaattcagatcggtcaatgcagtggccttcaacctgctggtgacccttaggattgacaaggcgataggccctgggaagatcatcgacaatacagagcaacttcctgaggcaacatttatggtccacatcgggaacttcaggagaaagaagagtgaagtctactctgccgattattgcaaaatgaaaatcgaaaagatgggcctggtttttgcacttggtgggatagggggcaccagtcttcacattagaagcacaggcaaaatgagcaagactctccatgcacaactcgggttcaagaagaccttatgttacccgctgatggatatcaatgaagaccttaatcgattactctggaggagcagatgcaagatagtaagaatccaggcagttttgcagccatcagttcctcaagaattccgcatttacgacgacgtgatcataaatgatgaccaaggactattcaaagttctgtagaccgtagtgcccagcaatgcccgaaaacgacccccctcacaatgacagccagaaggcccggacaaaaaagccccctccgaaagactccacggaccaagcgagaggccagccagcagccgacggcaagcgcgaacaccaggcggccccagcacagaacagccccgacacaaggccaccaccagccaccccaatctgcatcctcctcgtgggacccccgaggaccaacccccaaggctgcccccgatccaaaccaccaaccgcatccccaccacccccgggaaagaaacccccagcaattggaaggcccctccccctcttcctcaacacaagaactccacaaccgaaccgcacaagcgaccgaggtgacccaaccgcaggcatccgactccctagacagatcctctctccccggcaaactaaacaaaacttagggccaaggaacatacacacccaacagaacccagaccccggcccacggcgccgcgcccccaacccccgacaaccagagggagcccccaaccaatcccgccggctcccccggtgcccacaggcagggacaccaacccccgaacagacccagcacccaaccatcgacaatccaagacgggggggcccccccaaaaaaaggcccccaggggccgacagccagcaccgcgaggaagcccacccaccccacacacgaccacggcaaccaaaccagaacccagaccaccctgggccaccagctcccagactcggccatcaccccgcagaaaggaaaggccacaacccgcgcaccccagccccgatccggcggggagccacccaacccgaaccagcacccaagagcgatccccgaaggacccccgaaccgcaaaggacaccagtatcccacagcctctccaagtcccccggtctcctcctcttctcgaagggaccaaaagatcaatccaccacacccgacgacactcaactccccacccctaaaggagacaccgggaatcccagaatcaagactcatccaatgtccatcatgggtctcaaggtgaacgtctctgccatattcatggcagtactgttaactctccaaacacccaccggtcaaatccattggggcaatctctctaagataggggtggtaggaataggaagtgcaagctacaaagttatgactcgttccagccatcaatcattagtcataaaattaatgcccaatataactctcctcaataactgcacgagggtagagattgcagaatacaggagactactgagaacagttttggaaccaattagagatgcacttaatgcaatgacccagaatataagaccggttcagagtgtagcttcaagtaggagacacaagagatttgcgggagtagtcctggcaggtgcggccctaggcgttgccacagctgctcagataacagccggcattgcacttcaccagtccatgctgaactctcaagccatcgacaatctgagagcgagcctggaaactactaatcaggcaattgaggcaatcagacaagcagggcaggagatgatattggctgttcagggtgtccaagactacatcaataatgagctgataccgtctatgaaccaactatcttgtgatttaatcggccagaagctcgggctcaaattgctcagatactatacagaaatcctgtcattatttggccccagtttacgggaccccatatctgcggagatatctatccaggctttgagctatgcgcttggaggagacatcaataaggtgttagaaaagctcggatacagtggaggtgatttactgggcatcttagagagcggaggcatcaaggcccggataactcacgtcgacacagagtcctacttcattgtcctcagtatagcctatccgacgctgtccgagattaagggggtgattgtccaccggctagagggggtctcgtacaacataggctctcaagagtggtataccactgtgcccaagtatgttgcaacccaagggtaccttatctcgaattttgatgagtcatcgtgtactttcatgccagaggggactgtgtgcagccaaaatgccttgtacccgatgagtcctctgctccaagaatgcctccgggggtacaccaagtcctgtgctcgtacactcgtatccgggtcttttgggaaccggttcattttatcacaagggaacctaatagccaattgtgcatcaatcctttgcaagtgttacacaacaggaacgatcattaatcaagaccctgacaagatcctaacatacattgctgccgatcactgcccggtagtcgaggtgaacggcgtgatcatccaagtcgggagcaggaggtatccagacgctgtgtacttgcacagaattgacctcggtcctcccatatcattggagaggttggacgtagggacaaatctggggaatgcaattgctaagttggaggatgccaaggaattgttggagtcatcggaccagatattgaggagtatgaaaggtttatcgagcactagcatagtctacatcctgattgcagtgtgtcttggagggttgatagggatccccgctttaatatgttgctgcagggggcgttgtaacaaaaagggagaacaagttggtatgtcaagaccaggcctaaagcctgatcttacgggaacatcaaaatcctatgtaaggtcgctctgatcctctacaactcttgaaacacaaatgtcccacaagtctcctcttcgtcatcaagcaaccaccgcacccagcatcaagcccacctgaaattatctccggcttccctctggccgaacaatatcggtagttaattaaaacttagggtgcaagatcatccacaatgtcaccacaacgagaccggataaatgccttctacaaagataacccccatcccaagggaagtaggatagtcattaacagagaacatcttatgattgatagaccttatgttttgctggctgttctgtttgtcatgtttctgagcttgatcgggttgctagccattgcaggcattagacttcatcgggcagccatctacaccgcagagatccataaaagcctcagcaccaatctagatgtaactaactcaatcgagcatcaggtcaaggacgtgctgacaccactcttcaaaatcatcggtgatgaagtgggcctgaggacacctcagagattcactgacctagtgaaattcatctctgacaagatcaagttccttaatccggatagggagtacgacttcagagatctcacttggtgtatcaacccgccagagagaatcaaattggattatgatcaatactgtgcagatgtggctgctgaagagctcatgaatgcattggtgaactcaactctactggagaccagaacaaccaatcagttcctagctgtctcaaagggaaactgctcagggcccactacaatcagaggtcaattctcaaacatgtcgctgtccctgttagacttgtatttaggtcgaggttacaatgtgtcatctatagtcactatgacatcccagggaatgtatgggggaacttacctagtggaaaagcctaatctgagcagcaaaaggtcagagttgtcacaactgagcatgtaccgagtgtttgaagtaggtgttatcagaaatccgggtttgggggctccggtgttccatatgacaaactatcttgagcaaccagtcagtaatgatctcagcaactgtatggtggctttgggggagctcaaactcgcagccctttgtcacggggaagattctatcacaattccctatcagggatcagggaaaggtgtcagcttccagctcgtcaagctaggtgtctggaaatccccaaccgacatgcaatcctgggtccccttatcaacggatgatccagtgatagacaggctttacctctcatctcacagaggtgttatcgctgacaatcaagcaaaatgggctgtcccgacaacacgaacagatgacaagttgcgaatggagacatgcttccaacaggcgtgtaagggtaaaatccaagcactctgcgagaatcccgagtgggcaccattgaaggataacaggattccttcatacggggtcttgtctgttgatctgagtctgacagttgagcttaaaatcaaaattgcttcgggattcgggccattgatcacacacggttcagggatggacctatacaaatccaaccacaacaatgtgtattggctgactatcccgccaatgaagaacctagccttaggtgtaatcaacacattggagtggataccgagattcaaggttagtccctacctcttcactgtcccaattaaggaagcaggcgaagactgccatgccccaacatacctacctgcggaggtggatggtgatgtcaaactcagttccaatctggtgattctacctggtcaagatctccaatatgttttggcaacctacgatacttccagggttgaacatgctgtggtttattacgtttacagcccaagccgctcattttcttacttttatccttttaggttgcctataaagggggtccccatcgaattacaagtggaatgcttcacatgggaccaaaaactctggtgccgtcacttctgtgtgcttgcggactcagaatctggtggacatatcactcactctgggatggtgggcatgggagtcagctgcacagtcacccgggaagatggaaccaatcgcagatagggctgctagtgaaccaatcacatgatgtcacccagacatcaggcatacccactagtgtgaaatagacatcagaattaagaaaaacgtagggtccaagtggttccccgttatggactcgctatctgtcaaccagatcttataccctgaagttcacctagatagcccgatagttaccaataagatagtagccatcctggagtatgctcgagtccctcacgcttacagcctggaggaccctacactgtgtcagaacatcaagcaccgcctaaaaaacggattttccaaccaaatgattataaacaatgtggaagttgggaatgtcatcaagtccaagcttaggagttatccggcccactctcatattccatatccaaattgtaatcaggatttatttaacatagaagacaaagagtcaacgaggaagatccgtgaactcctcaaaaaggggaattcgctgtactccaaagtcagtgataaggttttccaatgcttaagggacactaactcacggcttggcctaggctccgaattgagggaggacatcaaggagaaagttattaacttgggagtttacatgcacagctcccagtggtttgagccctttctgttttggtttacagtcaagactgagatgaggtcagtgattaaatcacaaacccatacttgccataggaggagacacacacctgtattcttcactggtagttcagttgagttgctaatctctcgtgaccttgttgctataatcagtaaagagtctcaacatgtatattacctgacatttgaactggttttgatgtattgtgatgtcatagaggggaggttaatgacagagaccgctatgactattgatgctaggtatacagagcttctaggaagagtcagatacatgtggaaactgatagatggtttcttccctgcactcgggaatccaacttatcaaattgtagccatgctggagcctctttcacttgcttacctgcagctgagggatataacagtagaactcagaggtgctttccttaaccactgctttactgaaatacatgatgttcttgaccaaaacgggttttctgatgaaggtacttatcatgagttaattgaagctctagattacattttcataactgatgacatacatctgacaggggagattttctcatttttcagaagtttcggccaccccagacttgaagcagtaacggctgctgaaaatgttaggaaatacatgaatcagcctaaagtcattgtgtatgagactctgatgaaaggtcatgccatattttgtggaatcataatcaacggctatcgtgacaggcacggaggcagttggccaccgctgaccctccccctgcatgctgcagacacaatccggaatgctcaagcttcaggtgaagggttaacacatgagcagtgcgttgataactggaaatcttttgctggagtgaaatttggctgctttatgcctcttagcctggatagtgatctgacaatgtacctaaaggacaaggcacttgctgctctccaaagggaatgggattcagtttacccgaaagagttcctgcgttacgaccctcccaagggaaccgggtcacggaggcttgtagatgttttccttaatgattcgagctttgacccatatgatgtgataatgtatgttgtaagtggagcttacctccatgaccctgagttcaacctgtcttacagcctgaaagaaaaggagatcaaggaaacaggtagactttttgctaaaatgacttacaaaatgagggcatgccaagtgattgctgaaaatctaatctcaaacgggattggcaaatattttaaggacaatgggatggccaaggatgagcacgatttgactaaggcactccacactctagctgtctcaggagtccccaaagatctcaaagaaagtcacaggggggggccagtcttaaaaacctactcccgaagcccagtccacacaagtaccaggaacgtgagagcagcaaaagggtttatagggttccctcaagtaattcggcaggaccaagacactgatcatccggagaatatggaagcttacgagacagtcagtgcatttatcacgactgatctcaagaagtactgccttaattggagatatgagaccatcagcttgtttgcacagaggctaaatgagatttacggattgccctcatttttccagtggctgcataagaggcttgagacctctgtcctgtatgtaagtgaccctcattgcccccccgaccttgacgcccatatcccgttatataaagtccccaatgatcaaatcttcattaagtaccctatgggaggtatagaagggtattgtcagaagctgtggaccatcagcaccattccctatctatacctggctgcttatgagagcggagtaaggattgcttcgttagtgcaaggggacaatcagaccatagccgtaacaaaaagggtacccagcacatggccctacaaccttaagaaacgggaagctgctagagtaactagagattactttgtaattcttaggcaaaggctacatgatattggccatcacctcaaggcaaatgagacaattgtttcatcacatttttttgtctattcaaaaggaatatattatgatgggctacttgtgtcccaatcactcaagagcatcgcaagatgtgtattctggtcagagactatagttgatgaaacaagggcagcatgcagtaatattgctacaacaatggctaaaagcatcgagagaggttatgaccgttaccttgcatattccctgaacgtcctaaaagtgatacagcaaattctgatctctcttggcttcacaatcaattcaaccatgacccgggatgtagtcatacccctcctcacaaacaacgacctcttaataaggatggcactgttgcccgctcctattggggggatgaattatctgaatatgagcaggctgtttgtcagaaacatcggtgatccagtaacatcatcaattgctgatctcaagagaatgattctcgcctcactaatgcctgaagagaccctccatcaagtaatgacacaacaaccgggggactcttcattcctagactgggctagcgacccttactcagcaaatcttgtatgtgtccagagcatcactagactcctcaagaacataactgcaaggtttgtcctgatccatagtccaaacccaatgttaaaaggattattccatgatgacagtaaagaagaggacgagggactggcggcattcctcatggacaggcatattatagtacctagggcagctcatgaaatcctggatcatagtgtcacaggggcaagagagtctattgcaggcatgctggataccacaaaaggcttgattcgagccagcatgaggaagggggggttaacctctcgagtgataaccagattgtccaattatgactatgaacaattcagagcagggatggtgctattgacaggaagaaagcgaaatgtcctcattgacaaagagtcatgttcagtgcagctggcgagagctctaagaagccatatgtgggcgaggctagctcgaggacggcctatttacggccttgaggtccctgatgtactagaatctatgcgaggccaccttattcggcgtcatgagacatgtgtcatctgcgagtgtggatcagtcaactacggatggttttttgtcccctcgggttgccaactggatgatattgacaaggaaacatcatccttgagagtcccatatattggttctaccactgatgagagaacagacatgaagcttgccttcgtaagagccccaagtcgatccttgcgatctgctgttagaatagcaacagtgtactcatgggcttacggtgatgatgatagctcttggaacgaagcctggttgttggctaggcaaagggccaatgtgagcctggaggagctaagggtgatcactcccatctcaacttcgactaatttagcgcataggttgagggatcgtagcactcaagtgaaatactcaggtacatcccttgtccgagtggcgaggtataccacaatctccaacgacaatctctcatttgtcatatcagataagaaggttgatactaactttatataccaacaaggaatgcttctagggttgggtgttttagaaacattgtttcgactcgagaaagataccggatcatctaacacggtattacatcttcacgtcgaaacagattgttgcgtgatcccgatgatagatcatcccaggatacccagctcccgcaagctagagctgagggcagagctatgtaccaacccattgatatatgataatgcacctttaattgacagagatgcaacaaggctatacacccagagccataggaggcaccttgtggaatttgttacatggtccacaccccaactatatcacattttagctaagtccacagcactatctatgattgacctggtaacaaaatttgagaaggaccatatgaatgaaatttcagctctcataggggatgacgatatcaatagtttcataactgagtttctgctcatagagccaagattattcactatctacttgggccagtgtgcggccatcaattgggcatttgatgtacattatcatagaccatcagggaaatatcagatgggtgagctgttgtcatcgttcctttctagaatgagcaaaggagtgtttaaggtgcttgtcaatgctctaagccacccaaagatctacaagaaattctggcattgtggtattatagagcctatccatggtccttcacttgatgctcaaaacttgcacacaactgtgtgcaacatggtttacacatgctatatgacctacctcgacctgttgttgaatgaagagttagaagagttcacatttctcttgtgtgaaagcgacgaggatgtagtaccggacagattcgacaacatccaggcaaaacacttatgtgttctggcagatttgtactgtcaaccagggacctgcccaccaattcgaggtctaagaccggtagagaaatgtgcagttctaaccgaccatatcaaggcagaggctatgttatctccagcaggatcttcgtggaacataaatccaattattgtagaccattactcatgctctctgacttatctccggcgaggatcgatcaaacagataagattgagagttgatccaggattcattttcgacgccctcgctgaggtaaatgtcagtcagccaaagatcggcagcaacaacatctcaaatatgagcatcaaggctttcagacccccacacgatgatgttgcaaaattgctcaaagatatcaacacaagcaagcacaatcttcccatttcagggggcaatctcgccaattatgaaatccatgctttccgcagaatcgggttgaactcatctgcttgctacaaagctgttgagatatcaacattaattaggagatgccttgagccaggggaggacggcttgttcttgggtgagggatcgggttctatgttgatcacttataaggagatacttaaactaaacaagtgcttctataatagtggggtttccgccaattctagatctggtcaaagggaattagcaccctatccctccgaagttggccttgtcgaacacagaatgggagtaggtaatattgtcaaagtgctctttaacgggaggcccgaagtcacgtgggtaggcagtgtagattgcttcaatttcatagttagtaatatccctacctctagtgtggggtttatccattcagatatagagaccttgcctgacaaagatactatagagaagctagaggaattggcagccatcttatcgatggctctgctcctgggcaaaataggatcaatactggtgattaagcttatgcctttcagcggggattttgttcagggatttataagttatgtagggtctcattatagagaagtgaaccttgtataccctagatacagcaacttcatctctactgaatcttatttggttatgacagatctcaaggctaaccggctaatgaatcctgaaaagattaagcagcagataattgaatcatctgtgaggacttcacctggacttataggtcacatcctatccattaagcaactaagctgcatacaagcaattgtgggagacgcagttagtagaggtgatatcaatcctactctgaaaaaacttacacctatagagcaggtgctgatcaattgcgggttggcaattaacggacctaagctgtgcaaagaattgatccaccatgatgttgcctcagggcaagatggattgcttaattctatactcatcctctacagggagttggcaagattcaaagacaaccaaagaagtcaacaagggatgttccacgcttaccccgtattggtaagtagcaggcaacgagaacttatatctaggatcacccgcaaattctgggggcacattcttctttactccgggaacagaaagttgataaataagtttatccagaatctcaagtccggctatctgatactagacttacaccagaatatcttcgttaagaatctatccaagtcagagaaacagattattatgacggggggtttgaaacgtgagtgggtttttaaggtaacagtcaaggagaccaaagaatggtataagttagtcggatacagtgccctgattaaggactaattggttgaactccggaaccctaatcctgccctaggtggttaggcattatttgcaatatattaaagaaaactttgaaaatacgaagtttctattcccagctttgtctggtggccggcatggtcccagcctcctcgctggcgccggctgggcaacattccgaggggaccgtcccctcggtaatggcgaatgggacgcggccggtcgatcgacgatccggctgctaacaaagcccgaaaggaagctgagttggctgctgccaccgctgagcaataactagcataaccccttggggcctctaaacgggtcttgaggggttttttgctgaaaggaggaactatatccggatcgagatcaattctgtgagcgtatggcaaacgaaggaaaaatagttatagtagccgcactcgatgggacatttcaacgtaaaccgtttaataatattttgaatcttattccattatctgaaatggtggtaaaactaactgctgtgtgtatgaaatgctttaaggaggcttccttttctaaacgattgggtgaggaaaccgagatagaaataataggaggtaatgatatgtatcaatcggtgtgtagaaagtgttacatcgactcataatattatattttttatctaaaaaactaaaaataaacattgattaaattttaatataatacttaaaaatggatgttgtgtcgttagataaaccgtttatgtattttgaggaaattgataatgagttagattacgaaccagaaagtgcaaatgaggtcgcaaaaaaactgccgtatcaaggacagttaaaactattactaggagaattattttttcttagtaagttacagcgacacggtatattagatggtgccaccgtagtgtatataggatctgctcccggtacacatatacgttatttgagagatcatttctataatttaggagtgatcccgaaaggaagctgagttggctgctgccaccgctgagcaataactagcataaccccttggggcctctaaacgggtcttgaggggttttttgctgaaaggaggaacgcgcctgatgcggtattttctccttacgcatctgtgcggtatttcacaccgcatatatggtgcactctcagtacaatctgctctgatgccgcatagttaagccagccccgacacccgccaacacccgctgacgcgccctgacgggcttgtctgctcccggcatccgcttacagacaagctgtgaccgtctccgggagctgcatgtgtcagaggttttcaccgtcatcaccgaaacgcgcgagacgaaagggcctcgtgatacgcctatttttataggttaatgtcatgataataatggtttcttagacgtcaggtggcacttttcggggaaatgtgcgcggaacccctatttgtttatttttctaaatacattcaaatatgtatccgctcatgagacaataaccctgataaatgcttcaataatattgaaaaaggaagagtatgagtattcaacatttccgtgtcgcccttattcccttttttgcggcattttgccttcctgtttttgctcacccagaaacgctggtgaaagtaaaagatgctgaagatcagttgggtgcacgagtgggttacatcgaactggatctcaacagcggtaagatccttgagagttttcgccccgaagaacgttttccaatgatgagcacttttaaagttctgctatgtggcgcggtattatcccgtattgacgccgggcaagagcaactcggtcgccgcatacactattctcagaatgacttggttgagtactcaccagtcacagaaaagcatcttacggatggcatgacagtaagagaattatgcagtgctgccataaccatgagtgataacactgcggccaacttacttctgacaacgatcggaggaccgaaggagctaaccgcttttttgcacaacatgggggatcatgtaactcgccttgatcgttgggaaccggagctgaatgaagccataccaaacgacgagcgtgacaccacgatgcctgtagcaatggcaacaacgttgcgcaaactattaactggcgaactacttactctagcttcccggcaacaattaatagactggatggaggcggataaagttgcaggaccacttctgcgctcggcccttccggctggctggtttattgctgataaatctggagccggtgagcgtgggtctcgcggtatcattgcagcactggggccagatggtaagccctcccgtatcgtagttatctacacgacggggagtcaggcaactatggatgaacgaaatagacagatcgctgagataggtgcctcactgattaagcattggtaactgtcagaccaagtttactcatatatactttagattgatttaaaacttcatttttaatttaaaaggatctaggtgaagatcctttttgataatctcatgaccaaaatcccttaacgtgagttttcgttccactgagcgtcagaccccgtagaaaagatcaaaggatcttcttgagatcctttttttctgcgcgtaatctgctgcttgcaaacaaaaaaaccaccgctaccagcggtggtttgtttgccggatcaagagctaccaactctttttccgaaggtaactggcttcagcagagcgcagataccaaatactgtccttctagtgtagccgtagttaggccaccacttcaagaactctgtagcaccgcctacatacctcgctctgctaatcctgttaccagtggctgctgccagtggcgataagtcgtgtcttaccgggttggactcaagacgatagttaccggataaggcgcagcggtcgggctgaacggggggttcgtgcacacagcccagcttggagcgaacgacctacaccgaactgagatacctacagcgtgagcattgagaaagcgccacgcttcccgaagggagaaaggcggacaggtatccggtaagcggcagggtcggaacaggagagcgcacgagggagcttccagggggaaacgcctggtatctttatagtcctgtcgggtttcgccacctctgacttgagcgtcgatttttgtgatgctcgtcaggggggcggagcctatggaaaaacgccagcaacgcggcctttttacggttcctggccttttgctggccttttgctcacatgttctttcctgcgttatcccctgattctgtggataaccgtattaccgcctttgagtgagctgataccgctcgccgcagccgaacgaccgagcgcagcgagtcagtgagcgaggaagcggaagagcgcccaatacgcaaaccgcctctccccgcgcgttggccgattcattaatgcagctggcacgacaggtttcccgactggaaagcgggcagtgagcgcaacgcaattaatgtgagttagctcactcattaggcaccccaggctttacactttatgcttccggctcgtatgttgtgtggaattgtgagcggataacaatttcacacaggaaacagctatgaccatgattacgccaagcttacgcgtcctggcattatgcccagtacatgaccttatgggactttcctacttggcagtacatctacgtattagtcatcgctattaccatggtgatgcggttttggcagtacatcaatgggcgtggatagcggtttgactcacggggatttccaagtctccaccccattgacgtcaatgggagtttgttttggcaccaaaatcaacgggactttccaaaatgtcgtaacaactccgccccattgacgcaaatgggcggtaggcgtgtacggtgggaggtctatataagcagagctcgtttagtgaaccgtgg

SEQ ID NO: 119 - DNA, 35191 bp, Artificial Sequence
  Construct in pAV-CMV vector
catcatcaataatataccttattttggattgaagccaatatgataatgagggggtggagtttgtgacgtggcgcggggcgtgggaacggggcgggtgacgtagtagtgtggcggaagtgtgatgttgcaagtgtggcggaacacatgtaagcgacggatgtggcaaaagtgacgtttttggtgtgcgccggtgtacacaggaagtgacaattttcgcgcggttttaggcggatgttgtagtaaatttgggcgtaaccgagtaagatttggccattttcgcgggaaaactgaataagaggaagtgaaatctgaataattttgtgttactcatagcgcgtaatatttgtctagggccgcggggactttgaccgtttacgtggagactcgcccaggtgtttttctcaggtgttttccgcgttccgggtcaaagttggcgttttattattatagtcagtcgaagcttggatccggtacctctagaattctcgagcggccgctagcgacatcggatctcccgatcccctatggtcgactctcagtacaatctgctctgatgccgcatagttaagccagtatctgctccctgcttgtgtgttggaggtcgctgagtagtgcgcgagcaaaatttaagctacaacaaggcaaggcttgaccgacaattgcatgaagaatctgcttagggttaggcgttttgcgctgcttcgcgatgtacgggccagatatacgcgttgacattgattattgactagttattaatagtaatcaattacggggtcattagttcatagcccatatatggagttccgcgttacataacttacggtaaatggcccgcctggctgaccgcccaacgacccccgcccattgacgtcaataatgacgtatgttcccatagtaacgccaatagggactttccattgacgtcaatgggtggactatttacggtaaactgcccacttggcagtacatcaagtgtatcatatgccaagtacgccccctattgacgtcaatgacggtaaatggcccgcctggcattatgcccagtacatgaccttatgggactttcctacttggcagtacatctacgtattagtcatcgctattaccatggtgatgcggttttggcagtacatcaatgggcgtggatagcggtttgactcacggggatttccaagtctccaccccattgacgtcaatgggagtttgttttggcaccaaaatcaacgggactttccaaaatgtcgtaacaactccgccccattgacgcaaatgggcggtaggcgtgtacggtgggaggtctatataagcagagctctctggctaactagagaacccactgcttactggcttatcgaaattaatacgactcactatagggagacccaagctggctagttaagctatcaacaagtttgtacaaaaaagcaggctgccaccatgcccatggggtctctgcaaccgctggccaccttgtacctgctggggatgctggtcgcttcctgcctcggaggcgttcgactttgggctacaagacaggcaatgctgggccaggtccatgaggttcctgaggggtggctcattttcgtggccgagcaggaggagctgtatgttcgcgtgcaaaacggctttaggaaggtccagctggaagcgcggacacctttgcccaggggaaccgataacgagggatccggcatgtttgcgcagctggtggcccaaaatgttctgctgatcgatgggcccctgagctggtacagtgacccaggcctggcaggcgtgtccctgacggggggcctgagctacaaagaggacacgaaggagctggtggtggccaaggctggagtctactatgtcttctttcaactagagctgcggcgcgtggtggccggcgagggctcaggctccgtttcacttgcgctgcacctgcagccactgcgctctgctgctggggccgccgccctggctttgaccgtggacctgccacccgcctcctccgaggctcggaactcggccttcggtttccagggccgcttgctgcacctgagtgccggccagcgcctgggcgtccatcttcacactgaggccagggcacgccatgcctggcagcttacccagggcgccacagtcttgggactcttccgggtgaccccctaaacccagctttcttgtacaaagtggttgatctagagggcccgcggttcgaaggtaagcctatccctaaccctctcctcggtctcgattctacgcgtaccggttagtaatgagtttaaacgggggaggctaactgaaacacggaaggagacaataccggaaggaacccgcgctatgacggcaataaaaagacagaataaaacgcacgggtgttgggtcgtttgttcataaacgcggggttcggtcccagggctggcactctgtcgataccccaccgagaccccattggggccaatacgcccgcgtttcttccttttccccaccccaccccccaagttcgggtgaaggcccagggctcgcagccaacgtcggggcggcaggccctgccatagcagatccgattcgacagatcactgaaatgtgtgggcgtggcttaagggtgggaaagaatatataaggtgggggtcttatgtagttttgtatctgttttgcagcagccgccgccgccatgagcaccaactcgtttgatggaagcattgtgagctcatatttgacaacgcgcatgcccccatgggccggggtgcgtcagaatgtgatgggctccagcattgatggtcgccccgtcctgcccgcaaactctactaccttgacctacgagaccgtgtctggaacgccgttggagactgcagcctccgccgccgcttcagccgctgcagccaccgcccgcgggattgtgactgactttgctttcctgagcccgcttgcaagcagtgcagcttcccgttcatccgcccgcgatgacaagttgacggctcttttggcacaattggattctttgacccgggaacttaatgtcgtttctcagcagctgttggatctgcgccagcaggtttctgccctgaaggcttcctcccctcccaatgcggtttaaaacataaataaaaaaccagactctgtttggatttggatcaagcaagtgtcttgctgtctttatttaggggttttgcgcgcgcggtaggcccgggaccagcggtctcggtcgttgagggtcctgtgtattttttccaggacgtggtaaaggtgactctggatgttcagatacatgggcataagcccgtctctggggtggaggtagcaccactgcagagcttcatgctgcggggtggtgttgtagatgatccagtcgtagcaggagcgctgggcgtggtgcctaaaaatgtctttcagtagcaagctgattgccaggggcaggcccttggtgtaagtgtttacaaagcggttaagctgggatgggtgcatacgtggggatatgagatgcatcttggactgtatttttaggttggctatgttcccagccatatccctccggggattcatgttgtgcagaaccaccagcacagtgtatccggtgcacttgggaaatttgtcatgtagcttagaaggaaatgcgtggaagaacttggagacgcccttgtgacctccaagattttccatgcattcgtccataatgatggcaatgggcccacgggcggcggcctgggcgaagatatttctgggatcactaacgtcatagttgtgttccaggatgagatcgtcataggccatttttacaaagcgcgggcggagggtgccagactgcggtataatggttccatccggcccaggggcgtagttaccctcacagatttgcatttcccacgctttgagttcagatggggggatcatgtctacctgcggggcgatgaagaaaacggtttccggggtaggggagatcagctgggaagaaagcaggttcctgagcagctgcgacttaccgcagccggtgggcccgtaaatcacacctattaccgggtgcaactggtagttaagagagctgcagctgccgtcatccctgagcaggggggccacttcgttaagcatgtccctgactcgcatgttttccctgaccaaatccgccagaaggcgctcgccgcccagcgatagcagttcttgcaaggaagcaaagtttttcaacggtttgagaccgtccgccgtaggcatgcttttgagcgtttgaccaagcagttccaggcggtcccacagctcggtcacctgctctacggcatctcgatccagcatatctcctcgtttcgcgggttggggcggctttcgctgtacggcagtagtcggtgctcgtccagacgggccagggtcatgtctttccacgggcgcagggtcctcgtcagcgtagtctgggtcacggtgaaggggtgcgctccgggctgcgcgctggccagggtgcgcttgaggctggtcctgctggtgctgaagcgctgccggtcttcgccctgcgcgtcggccaggtagcatttgaccatggtgtcatagtccagcccctccgcggcgtggcccttggcgcgcagcttgcccttggaggaggcgccgcacgaggggcagtgcagacttttgagggcgtagagcttgggcgcgagaaataccgattccggggagtaggcatccgcgccgcaggccccgcagacggtctcgcattccacgagccaggtgagctctggccgttcggggtcaaaaaccaggtttcccccatgctttttgatgcgtttcttacctctggtttccatgagccggtgtccacgctcggtgacgaaaaggctgtccgtgtccccgtatacagacttgagaggcctgtcctcgagcggtgttccgcggtcctcctcgtatagaaactcggaccactctgagacaaaggctcgcgtccaggccagcacgaaggaggctaagtgggaggggtagcggtcgttgtccactagggggtccactcgctccagggtgtgaagacacatgtcgccctcttcggcatcaaggaaggtgattggtttgtaggtgtaggccacgtgaccgggtgttcctgaaggggggctataaaagggggtgggggcgcgttcgtcctcactctcttccgcatcgctgtctgcgagggccagctgttggggtgagtactccctctgaaaagcgggcatgacttctgcgctaagattgtcagtttccaaaaacgaggaggatttgatattcacctggcccgcggtgatgcctttgagggtggccgcatccatctggtcagaaaagacaatctttttgttgtcaagcttggtggcaaacgacccgtagagggcgttggacagcaacttggcgatggagcgcagggtttggtttttgtcgcgatcggcgcgctccttggccgcgatgtttagctgcacgtattcgcgcgcaacgcaccgccattcgggaaagacggtggtgcgctcgtcgggcaccaggtgcacgcgccaaccgcggttgtgcagggtgacaaggtcaacgctggtggctacctctccgcgtaggcgctcgttggtccagcagaggcggccgcccttgcgcgagcagaatggcggtagggggtctagctgcgtctcgtccggggggtctgcgtccacggtaaagaccccgggcagcaggcgcgcgtcgaagtagtctatcttgcatccttgcaagtctagcgcctgctgccatgcgcgggcggcaagcgcgcgctcgtatgggttgagtgggggaccccatggcatggggtgggtgagcgcggaggcgtacatgccgcaaatgtcgtaaacgtagaggggctctctgagtattccaagatatgtagggtagcatcttccaccgcggatgctggcgcgcacgtaatcgtatagttcgtgcgagggagcgaggaggtcgggaccgaggttgctacgggcgggctgctctgctcggaagactatctgcctgaagatggcatgtgagttggatgatatggttggacgctggaagacgttgaagctggcgtctgtgagacctaccgcgtcacgcacgaaggaggcgtaggagtcgcgcagcttgttgaccagctcggcggtgacctgcacgtctagggcgcagtagtccagggtttccttgatgatgtcatacttatcctgtcccttttttttccacagctcgcggttgaggacaaactcttcgcggtctttccagtactcttggatcggaaacccgtcggcctccgaacggtaagagcctagcatgtagaactggttgacggcctggtaggcgcagcatcccttttctacgggtagcgcgtatgcctgcgcggccttccggagcgaggtgtgggtgagcgcaaaggtgtccctgaccatgactttgaggtactggtatttgaagtcagtgtcgtcgcatccgccctgctcccagagcaaaaagtccgtgcgctttttggaacgcggatttggcagggcgaaggtgacatcgttgaagagtatctttcccgcgcgaggcataaagttgcgtgtgatgcggaagggtcccggcacctcggaacggttgttaattacctgggcggcgagcacgatctcgtcaaagccgttgatgttgtggcccacaatgtaaagttccaagaagcgcgggatgcccttgatggaaggcaattttttaagttcctcgtaggtgagctcttcaggggagctgagcccgtgctctgaaagggcccagtctgcaagatgagggttggaagcgacgaatgagctccacaggtcacgggccattagcatttgcaggtggtcgcgaaaggtcctaaactggcgacctatggccattttttctggggtgatgcagtagaaggtaagcgggtcttgttcccagcggtcccatccaaggttcgcggctaggtctcgcgcggcagtcactagaggctcatctccgccgaacttcatgaccagcatgaagggcacgagctgcttcccaaaggcccccatccaagtataggtctctacatcgtaggtgacaaagagacgctcggtgcgaggatgcgagccgatcgggaagaactggatctcccgccaccaattggaggagtggctattgatgtggtgaaagtagaagtccctgcgacgggccgaacactcgtgctggcttttgtaaaaacgtgcgcagtactggcagcggtgcacgggctgtacatcctgcacgaggttgacctgacgaccgcgcacaaggaagcagagtgggaatttgagcccctcgcctggcgggtttggctggtggtcttctacttcggctgcttgtccttgaccgtctggctgctcgaggggagttacggtggatcggaccaccacgccgcgcgagcccaaagtccagatgtccgcgcgcggcggtcggagcttgatgacaacatcgcgcagatgggagctgtccatggtctggagctcccgcggcgtcaggtcaggcgggagctcctgcaggtttacctcgcatagacgggtcagggcgcgggctagatccaggtgatacctaatttccaggggctggttggtggcggcgtcgatggcttgcaagaggccgcatccccgcggcgcgactacggtaccgcgcggcgggcggtgggccgcgggggtgtccttggatgatgcatctaaaagcggtgacgcgggcgagcccccggaggtagggggggctccggacccgccgggagagggggcaggggcacgtcggcgccgcgcgcgggcaggagctggtgctgcgcgcgtaggttgctggcgaacgcgacgacgcggcggttgatctcctgaatctggcgcctctgcgtgaagacgacgggcccggtgagcttgagcctgaaagagagttcgacagaatcaatttcggtgtcgttgacggcggcctggcgcaaaatctcctgcacgtctcctgagttgtcttgataggcgatctcggccatgaactgctcgatctcttcctcctggagatctccgcgtccggctcgctccacggtggcggcgaggtcgttggaaatgcgggccatgagctgcgagaaggcgttgaggcctccctcgttccagacgcggctgtagaccacgcccccttcggcatcgcgggcgcgcatgaccacctgcgcgagattgagctccacgtgccgggcgaagacggcgtagtttcgcaggcgctgaaagaggtagttgagggtggtggcggtgtgttctgccacgaagaagtacataacccagcgtcgcaacgtggattcgttgatatcccccaaggcctcaaggcgctccatggcctcgtagaagtccacggcgaagttgaaaaactgggagttgcgcgccgacacggttaactcctcctccagaagacggatgagctcggcgacagtgtcgcgcacctcgcgctcaaaggctacaggggcctcttcttcttcttcaatctcctcttccataagggcctccccttcttcttcttctggcggcggtgggggaggggggacacggcggcgacgacggcgcaccgggaggcggtcgacaaagcgctcgatcatctccccgcggcgacggcgcatggtctcggtgacggcgcggccgttctcgcgggggcgcagttggaagacgccgcccgtcatgtcccggttatgggttggcggggggctgccatgcggcagggatacggcgctaacgatgcatctcaacaattgttgtgtaggtactccgccgccgagggacctgagcgagtccgcatcgaccggatcggaaaacctctcgagaaaggcgtctaaccagtcacagtcgcaaggtaggctgagcaccgtggcgggcggcagcgggcggcggtcggggttgtttctggcggaggtgctgctgatgatgtaattaaagtaggcggtcttgagacggcggatggtcgacagaagcaccatgtccttgggtccggcctgctgaatgcgcaggcggtcggccatgccccaggcttcgttttgacatcggcgcaggtctttgtagtagtcttgcatgagcctttctaccggcacttcttcttctccttcctcttgtcctgcatctcttgcatctatcgctgcggcggcggcggagtttggccgtaggtggcgccctcttcctcccatgcgtgtgaccccgaagcccctcatcggctgaagcagggctaggtcggcgacaacgcgctcggctaatatggcctgctgcacctgcgtgagggtagactggaagtcatccatgtccacaaagcggtggtatgcgcccgtgttgatggtgtaagtgcagttggccataacggaccagttaacggtctggtgacccggctgcgagagctcggtgtacctgagacgcgagtaagccctcgagtcaaatacgtagtcgttgcaagtccgcaccaggtactggtatcccaccaaaaagtgcggcggcggctggcggtagaggggccagcgtagggtggccggggctccgggggcgagatcttccaacataaggcgatgatatccgtagatgtacctggacatccaggtgatgccggcggcggtggtggaggcgcgcggaaagtcgcggacgcggttccagatgttgcgcagcggcaaaaagtgctccatggtcgggacgctctggccggtcaggcgcgcgcaatcgttgacgctctagaccgtgcaaaaggagagcctgtaagcgggcactcttccgtggtctggtggataaattcgcaagggtatcatggcggacgaccggggttcgagccccgtatccggccgtccgccgtgatccatgcggttaccgcccgcgtgtcgaacccaggtgtgcgacgtcagacaacgggggagtgctccttttggcttccttccaggcgcggcggctgctgcgctagcttttttggccactggccgcgcgcagcgtaagcggttaggctggaaagcgaaagcattaagtggctcgctccctgtagccggagggttattttccaagggttgagtcgcgggacccccggttcgagtctcggaccggccggactgcggcgaacgggggtttgcctccccgtcatgcaagaccccgcttgcaaattcctccggaaacagggacgagccccttttttgcttttcccagatgcatccggtgctgcggcagatgcgcccccctcctcagcagcggcaagagcaagagcagcggcagacatgcagggcaccctcccctcctcctaccgcgtcaggaggggcgacatccgcggttgacgcggcagcagatggtgattacgaacccccgcggcgccgggcccggcactacctggacttggaggagggcgagggcctggcgcggctaggagcgccctctcctgagcggtacccaagggtgcagctgaagcgtgatacgcgtgaggcgtacgtgccgcggcagaacctgtttcgcgaccgcgagggagaggagcccgaggagatgcgggatcgaaagttccacgcagggcgcgagctgcggcatggcctgaatcgcgagcggttgctgcgcgaggaggactttgagcccgacgcgcgaaccgggattagtcccgcgcgcgcacacgtggcggccgccgacctggtaaccgcatacgagcagacggtgaaccaggagattaactttcaaaaaagctttaacaaccacgtgcgtacgcttgtggcgcgcgaggaggtggctataggactgatgcatctgtgggactttgtaagcgcgctggagcaaaacccaaatagcaagccgctcatggcgcagctgttccttatagtgcagcacagcagggacaacgaggcattcagggatgcgctgctaaacatagtagagcccgagggccgctggctgctcgatttgataaacatcctgcagagcatagtggtgcaggagcgcagcttgagcctggctgacaaggtggccgccatcaactattccatgcttagcctgggcaagttttacgcccgcaagatataccataccccttacgttcccatagacaaggaggtaaagatcgaggggttctacatgcgcatggcgctgaaggtgcttaccttgagcgacgacctgggcgtttatcgcaacgagcgcatccacaaggccgtgagcgtgagccggcggcgcgagctcagcgaccgcgagctgatgcacagcctgcaaagggccctggctggcacgggcagcggcgatagagaggccgagtcctactttgacgcgggcgctgacctgcgctgggccccaagccgacgcgccctggaggcagctggggccggacctgggctggcggtggcacccgcgcgcgctggcaacgtcggcggcgtggaggaatatgacgaggacgatgagtacgagccagaggacggcgagtactaagcggtgatgtttctgatcagatgatgcaagacgcaacggacccggcggtgcgggcggcgctgcagagccagccgtccggccttaactccacggacgactggcgccaggtcatggaccgcatcatgtcgctgactgcgcgcaatcctgacgcgttccggcagcagccgcaggccaaccggctctccgcaattctggaagcggtggtcccggcgcgcgcaaaccccacgcacgagaaggtgctggcgatcgtaaacgcgctggccgaaaacagggccatccggcccgacgaggccggcctggtctacgacgcgctgcttcagcgcgtggctcgttacaacagcggcaacgtgcagaccaacctggaccggctggtgggggatgtgcgcgaggccgtggcgcagcgtgagcgcgcgcagcagcagggcaacctgggctccatggttgcactaaacgccttcctgagtacacagcccgccaacgtgccgcggggacaggaggactacaccaactttgtgagcgcactgcggctaatggtgactgagacaccgcaaagtgaggtgtaccagtctgggccagactattttttccagaccagtagacaaggcctgcagaccgtaaacctgagccaggctttcaaaaacttgcaggggctgtggggggtgcgggctcccacaggcgaccgcgcgaccgtgtctagcttgctgacgcccaactcgcgcctgttgctgctgctaatagcgcccttcacggacagtggcagcgtgtcccgggacacatacctaggtcacttgctgacactgtaccgcgaggccataggtcaggcgcatgtggacgagcatactttccaggagattacaagtgtcagccgcgcgctggggcaggaggacacgggcagcctggaggcaaccctaaactacctgctgaccaaccggcggcagaagatcccctcgttgcacagtttaaacagcgaggaggagcgcattttgcgctacgtgcagcagagcgtgagccttaacctgatgcgcgacggggtaacgcccagcgtggcgctggacatgaccgcgcgcaacatggaaccgggcatgtatgcctcaaaccggccgtttatcaaccgcctaatggactacttgcatcgcgcggccgccgtgaaccccgagtatttcaccaatgccatcttgaacccgcactggctaccgccccctggtttctacaccgggggattcgaggtgcccgagggtaacgatggattcctctgggacgacatagacgacagcgtgttttccccgcaaccgcagaccctgctagagttgcaacagcgcgagcaggcagaggcggcgctgcgaaaggaaagcttccgcaggccaagcagcttgtccgatctaggcgctgcggccccgcggtcagatgctagtagcccatttccaagcttgatagggtctcttaccagcactcgcaccacccgcccgcgcctgctgggcgaggaggagtacctaaacaactcgctgctgcagccgcagcgcgaaaaaaacctgcctccggcatttcccaacaacgggatagagagcctagtggacaagatgagtagatggaagacgtacgcgcaggagcacagggacgtgccaggcccgcgcccgcccacccgtcgtcaaaggcacgaccgtcagcggggtctggtgtgggaggacgatgactcggcagacgacagcagcgtcctggatttgggagggagtggcaacccgtttgcgcaccttcgccccaggctggggagaatgttttaaaaaaaaaaaagcatgatgcaaaataaaaaactcaccaaggccatggcaccgagcgttggttttcttgtattccccttagtatgcggcgcgcggcgatgtatgaggaaggtcctcctccctcctacgagagtgtggtgagcgcggcgccagtggcggcggcgctgggttctcccttcgatgctcccctggacccgccgtttgtgcctccgcggtacctgcggcctaccggggggagaaacagcatccgttactctgagttggcacccctattcgacaccacccgtgtgtacctggtggacaacaagtcaacggatgtggcatccctgaactaccagaacgaccacagcaactttctgaccacggtcattcaaaacaatgactacagcccgggggaggcaagcacacagaccatcaatcttgacgaccggtcgcactggggcggcgacctgaaaaccatcctgcataccaacatgccaaatgtgaacgagttcatgtttaccaataagtttaaggcgcgggtgatggtgtcgcgcttgcctactaaggacaatcaggtggagctgaaatacgagtgggtggagttcacgctgcccgagggcaactactccgagaccatgaccatagaccttatgaacaacgcgatcgtggagcactacttgaaagtgggcagacagaacggggttctggaaagcgacatcggggtaaagtttgacacccgcaacttcagactggggtttgaccccgtcactggtcttgtcatgcctggggtatatacaaacgaagccttccatccagacatcattttgctgccaggatgcggggtggacttcacccacagccgcctgagcaacttgttgggcatccgcaagcggcaacccttccaggagggctttaggatcacctacgatgatctggagggtggtaacattcccgcactgttggatgtggacgcctaccaggcgagcttgaaagatgacaccgaacagggcgggggtggcgcaggcggcagcaacagcagtggcagcggcgcggaagagaactccaacgcggcagccgcggcaatgcagccggtggaggacatgaacgatcatgccattcgcggcgacacctttgccacacgggctgaggagaagcgcgctgaggccgaagcagcggccgaagctgccgcccccgctgcgcaacccgaggtcgagaagcctcagaagaaaccggtgatcaaacccctgacagaggacagcaagaaacgcagttacaacctaataagcaatgacagcaccttcacccagtaccgcagctggtaccttgcatacaactacggcgaccctcagaccggaatccgctcatggaccctgctttgcactcctgacgtaacctgcggctcggagcaggtctactggtcgttgccagacatgatgcaagaccccgtgaccttccgctccacgcgccagatcagcaactttccggtggtgggcgccgagctgttgcccgtgcactccaagagcttctacaacgaccaggccgtctactcccaactcatccgccagtttacctctctgacccacgtgttcaatcgctttcccgagaaccagattttggcgcgcccgccagcccccaccatcaccaccgtcagtgaaaacgttcctgctctcacagatcacgggacgctaccgctgcgcaacagcatcggaggagtccagcgagtgaccattactgacgccagacgccgcacctgcccctacgtttacaaggccctgggcatagtctcgccgcgcgtcctatcgagccgcactttttgagcaagcatgtccatccttatatcgcccagcaataacacaggctggggcctgcgcttcccaagcaagatgtttggcggggccaagaagcgctccgaccaacacccagtgcgcgtgcgcgggcactaccgcgcgccctggggcgcgcacaaacgcggccgcactgggcgcaccaccgtcgatgacgccatcgacgcggtggtggaggaggcgcgcaactacacgcccacgccgccaccagtgtccacagtggacgcggccattcagaccgtggtgcgcggagcccggcgctatgctaaaatgaagagacggcggaggcgcgtagcacgtcgccaccgccgccgacccggcactgccgcccaacgcgcggcggcggccctgcttaaccgcgcacgtcgcaccggccgacgggcggccatgcgggccgctcgaaggctggccgcgggtattgtcactgtgccccccaggtccaggcgacgagcggccgccgcagcagccgcggccattagtgctatgactcagggtcgcaggggcaacgtgtattgggtgcgcgactcggttagcggcctgcgcgtgcccgtgcgcacccgccccccgcgcaactagattgcaagaaaaaactacttagactcgtactgttgtatgtatccagcggcggcggcgcgcaacgaagctatgtccaagcgcaaaatcaaagaagagatgctccaggtcatcgcgccggagatctatggccccccgaagaaggaagagcaggattacaagccccgaaagctaaagcgggtcaaaaagaaaaagaaagatgatgatgatgaacttgacgacgaggtggaactgctgcacgctaccgcgcccaggcgacgggtacagtggaaaggtcgacgcgtaaaacgtgttttgcgacccggcaccaccgtagtctttacgcccggtgagcgctccacccgcacctacaagcgcgtgtatgatgaggtgtacggcgacgaggacctgcttgagcaggccaacgagcgcctcggggagtttgcctacggaaagcggcataaggacatgctggcgttgccgctggacgagggcaacccaacacctagcctaaagcccgtaacactgcagcaggtgctgcccgcgcttgcaccgtccgaagaaaagcgcggcctaaagcgcgagtctggtgacttggcacccaccgtgcagctgatggtacccaagcgccagcgactggaagatgtcttggaaaaaatgaccgtggaacctgggctggagcccgaggtccgcgtgcggccaatcaagcaggtggcgccgggactgggcgtgcagaccgtggacgttcagatacccactaccagtagcaccagtattgccaccgccacagagggcatggagacacaaacgtccccggttgcctcagcggtggcggatgccgcggtgcaggcggtcgctgcggccgcgtccaagacctctacggaggtgcaaacggacccgtggatgtttcgcgtttcagccccccggcgcccgcgcggttcgaggaagtacggcgccgccagcgcgctactgcccgaatatgccctacatccttccattgcgcctacccccggctatcgtggctacacctaccgccccagaagacgagcaactacccgacgccgaaccaccactggaacccgccgccgccgtcgccgtcgccagcccgtgctggccccgatttccgtgcgcagggtggctcgcgaaggaggcaggaccctggtgctgccaacagcgcgctaccaccccagcatcgtttaaaagccggtctttgtggttcttgcagatatggccctcacctgccgcctccgtttcccggtgccgggattccgaggaagaatgcaccgtaggaggggcatggccggccacggcctgacgggcggcatgcgtcgtgcgcaccaccggcggcggcgcgcgtcgcaccgtcgcatgcgcggcggtatcctgcccctccttattccactgatcgccgcggcgattggcgccgtgcccggaattgcatccgtggccttgcaggcgcagagacactgattaaaaacaagttgcatgtggaaaaatcaaaataaaaagtctggactctcacgctcgcttggtcctgtaactattttgtagaatggaagacatcaactttgcgtctctggccccgcgacacggctcgcgcccgttcatgggaaactggcaagatatcggcaccagcaatatgagcggtggcgccttcagctggggctcgctgtggagcggcattaaaaatttcggttccaccgttaagaactatggcagcaaggcctggaacagcagcacaggccagatgctgagggataagttgaaagagcaaaatttccaacaaaaggtggtagatggcctggcctctggcattagcggggtggtggacctggccaaccaggcagtgcaaaataagattaacagtaagcttgatccccgccctcccgtagaggagcctccaccggccgtggagacagtgtctccagaggggcgtggcgaaaagcgtccgcgccccgacagggaagaaactctggtgacgcaaatagacgagcctccctcgtacgaggaggcactaaagcaaggcctgcccaccacccgtcccatcgcgcccatggctaccggagtgctgggccagcacacacccgtaacgctggacctgcctccccccgccgacacccagcagaaacctgtgctgccaggcccgaccgccgttgttgtaacccgtcctagccgcgcgtccctgcgccgcgccgccagcggtccgcgatcgttgcggcccgtagccagtggcaactggcaaagcacactgaacagcatcgtgggtctgggggtgcaatccctgaagcgccgacgatgcttctgaatagctaacgtgtcgtatgtgtgtcatgtatgcgtccatgtcgccgccagaggagctgctgagccgccgcgcgcccgctttccaagatggctaccccttcgatgatgccgcagtggtcttacatgcacatctcgggccaggacgcctcggagtacctgagccccgggctggtgcagtttgcccgcgccaccgagacgtacttcagcctgaataacaagtttagaaaccccacggtggcgcctacgcacgacgtgaccacagaccggtcccagcgtttgacgctgcggttcatccctgtggaccgtgaggatactgcgtactcgtacaaggcgcggttcaccctagctgtgggtgataaccgtgtgctggacatggcttccacgtactttgacatccgcggcgtgctggacaggggccctacttttaagccctactctggcactgcctacaacgccctggctcccaagggtgccccaaatccttgcgaatgggatgaagctgctactgctcttgaaataaacctagaagaagaggacgatgacaacgaagacgaagtagacgagcaagctgagcagcaaaaaactcacgtatttgggcaggcgccttattctggtataaatattacaaaggagggtattcaaataggtgtcgaaggtcaaacacctaaatatgccgataaaacatttcaacctgaacctcaaataggagaatctcagtggtacgaaactgaaattaatcatgcagctgggagagtccttaaaaagactaccccaatgaaaccatgttacggttcatatgcaaaacccacaaatgaaaatggagggcaaggcattcttgtaaagcaacaaaatggaaagctagaaagtcaagtggaaatgcaatttttctcaactactgaggcgaccgcaggcaatggtgataacttgactcctaaagtggtattgtacagtgaagatgtagatatagaaaccccagacactcatatttcttacatgcccactattaaggaaggtaactcacgagaactaatgggccaacaatctatgcccaacaggcctaattacattgcttttagggacaattttattggtctaatgtattacaacagcacgggtaatatgggtgttctggcgggccaagcatcgcagttgaatgctgttgtagatttgcaagacagaaacacagagctttcataccagcttttgcttgattccattggtgatagaaccaggtacttttctatgtggaatcaggctgttgacagctatgatccagatgttagaattattgaaaatcatggaactgaagatgaacttccaaattactgctttccactgggaggtgtgattaatacagagactcttaccaaggtaaaacctaaaacaggtcaggaaaatggatgggaaaaagatgctacagaattttcagataaaaatgaaataagagttggaaataattttgccatggaaatcaatctaaatgccaacctgtggagaaatttcctgtactccaacatagcgctgtatttgcccgacaagctaaagtacagtccttccaacgtaaaaatttctgataacccaaacacctacgactacatgaacaagcgagtggtggctcccgggttagtggactgctacattaaccttggagcacgctggtcccttgactatatggacaacgtcaacccatttaaccaccaccgcaatgctggcctgcgctaccgctcaatgttgctgggcaatggtcgctatgtgcccttccacatccaggtgcctcagaagttctttgccattaaaaacctccttctcctgccgggctcatacacctacgagtggaacttcaggaaggatgttaacatggttctgcagagctccctaggaaatgacctaagggttgacggagccagcattaagtttgatagcatttgcctttacgccaccttcttccccatggcccacaacaccgcctccacgcttgaggccatgcttagaaacgacaccaacgaccagtcctttaacgactatctctccgccgccaacatgctctaccctatacccgccaacgctaccaacgtgcccatatccatcccctcccgcaactgggcggctttccgcggctgggccttcacgcgccttaagactaaggaaaccccatcactgggctcgggctacgacccttattacacctactctggctctataccctacctagatggaaccttttacctcaaccacacctttaagaaggtggccattacctttgactcttctgtcagctggcctggcaatgaccgcctgcttacccccaacgagtttgaaattaagcgctcagttgacggggagggttacaacgttgcccagtgtaacatgaccaaagactggttcctggtacaaatgctagctaactacaacattggctaccagggcttctatatcccagagagctacaaggaccgcatgtactccttctttagaaacttccagcccatgagccgtcaggtggtggatgatactaaatacaaggactaccaacaggtgggcatcctacaccaacacaacaactctggatttgttggctaccttgcccccaccatgcgcgaaggacaggcctaccctgctaacttcccctatccgcttataggcaagaccgcagttgacagcattacccagaaaaagtttctttgcgatcgcaccctttggcgcatcccattctccagtaactttatgtccatgggcgcactcacagacctgggccaaaaccttctctacgccaactccgcccacgcgctagacatgacttttgaggtggatcccatggacgagcccacccttctttatgttttgtttgaagtctttgacgtggtccgtgtgcaccggccgcaccgcggcgtcatcgaaaccgtgtacctgcgcacgcccttctcggccggcaacgccacaacataaagaagcaagcaacatcaacaacagctgccgccatgggctccagtgagcaggaactgaaagccattgtcaaagatcttggttgtgggccatattttttgggcacctatgacaagcgctttccaggctttgtttctccacacaagctcgcctgcgccatagtcaatacggccggtcgcgagactgggggcgtacactggatggcctttgcctggaacccgcactcaaaaacatgctacctctttgagccctttggcttttctgaccagcgactcaagcaggtttaccagtttgagtacgagtcactcctgcgccgtagcgccattgcttcttcccccgaccgctgtataacgctggaaaagtccacccaaagcgtacaggggcccaactcggccgcctgtggactattctgctgcatgtttctccacgcctttgccaactggccccaaactcccatggatcacaaccccaccatgaaccttattaccggggtacccaactccatgctcaacagtccccaggtacagcccaccctgcgtcgcaaccaggaacagctctacagcttcctggagcgccactcgccctacttccgcagccacagtgcgcagattaggagcgccacttctttttgtcacttgaaaaacatgtaaaaataatgtactagagacactttcaataaaggcaaatgcttttatttgtacactctcgggtgattatttacccccacccttgccgtctgcgccgtttaaaaatcaaaggggttctgccgcgcatcgctatgcgccactggcagggacacgttgcgatactggtgtttagtgctccacttaaactcaggcacaaccatccgcggcagctcggtgaagttttcactccacaggctgcgcaccatcaccaacgcgtttagcaggtcgggcgccgatatcttgaagtcgcagttggggcctccgccctgcgcgcgcgagttgcgatacacagggttgcagcactggaacactatcagcgccgggtggtgcacgctggccagcacgctcttgtcggagatcagatccgcgtccaggtcctccgcgttgctcagggcgaacggagtcaactttggtagctgccttcccaaaaagggcgcgtgcccaggctttgagttgcactcgcaccgtagtggcatcaaaaggtgaccgtgcccggtctgggcgttaggatacagcgcctgcataaaagccttgatctgcttaaaagccacctgagcctttgcgccttcagagaagaacatgccgcaagacttgccggaaaactgattggccggacaggccgcgtcgtgcacgcagcaccttgcgtcggtgttggagatctgcaccacatttcggccccaccggttcttcacgatcttggccttgctagactgctccttcagcgcgcgctgcccgttttcgctcgtcacatccatttcaatcacgtgctccttatttatcataatgcttccgtgtagacacttaagctcgccttcgatctcagcgcagcggtgcagccacaacgcgcagcccgtgggctcgtgatgcttgtaggtcacctctgcaaacgactgcaggtacgcctgcaggaatcgccccatcatcgtcacaaaggtcttgttgctggtgaaggtcagctgcaacccgcggtgctcctcgttcagccaggtcttgcatacggccgccagagcttccacttggtcaggcagtagtttgaagttcgcctttagatcgttatccacgtggtacttgtccatcagcgcgcgcgcagcctccatgcccttctcccacgcagacacgatcggcacactcagcgggttcatcaccgtaatttcactttccgcttcgctgggctcttcctcttcctcttgcgtccgcataccacgcgccactgggtcgtcttcattcagccgccgcactgtgcgcttacctcctttgccatgcttgattagcaccggtgggttgctgaaacccaccatttgtagcgccacatcttctctttcttcctcgctgtccacgattacctctggtgatggcgggcgctcgggcttgggagaagggcgcttctttttcttcttgggcgcaatggccaaatccgccgccgaggtcgatggccgcgggctgggtgtgcgcggcaccagcgcgtcttgtgatgagtcttcctcgtcctcggactcgatacgccgcctcatccgcttttttgggggcgcccggggaggcggcggcgacggggacggggacgacacgtcctccatggttgggggacgtcgcgccgcaccgcgtccgcgctcgggggtggtttcgcgctgctcctcttcccgactggccatttccttctcctataggcagaaaaagatcatggagtcagtcgagaagaaggacagcctaaccgccccctctgagttcgccaccaccgcctccaccgatgccgccaacgcgcctaccaccttccccgtcgaggcacccccgcttgaggaggaggaagtgattatcgagcaggacccaggttttgtaagcgaagacgacgaggaccgctcagtaccaacagaggataaaaagcaagaccaggacaacgcagaggcaaacgaggaacaagtcgggcggggggacgaaaggcatggcgactacctagatgtgggagacgacgtgctgttgaagcatctgcagcgccagtgcgccattatctgcgacgcgttgcaagagcgcagcgatgtgcccctcgccatagcggatgtcagccttgcctacgaacgccacctattctcaccgcgcgtaccccccaaacgccaagaaaacggcacatgcgagcccaacccgcgcctcaacttctaccccgtatttgccgtgccagaggtgcttgccacctatcacatctttttccaaaactgcaagatacccctatcctgccgtgccaaccgcagccgagcggacaagcagctggccttgcggcagggcgctgtcatacctgatatcgcctcgctcaacgaagtgccaaaaatctttgagggtcttggacgcgacgagaagcgcgcggcaaacgctctgcaacaggaaaacagcgaaaatgaaagtcactctggagtgttggtggaactcgagggtgacaacgcgcgcctagccgtactaaaacgcagcatcgaggtcacccactttgcctacccggcacttaacctaccccccaaggtcatgagcacagtcatgagtgagctgatcgtgcgccgtgcgcagcccctggagagggatgcaaatttgcaagaacaaacagaggagggcctacccgcagttggcgacgagcagctagcgcgctggcttcaaacgcgcgagcctgccgacttggaggagcgacgcaaactaatgatggccgcagtgctcgttaccgtggagcttgagtgcatgcagcggttctttgctgacccggagatgcagcgcaagctagaggaaacattgcactacacctttcgacagggctacgtacgccaggcctgcaagatctccaacgtggagctctgcaacctggtctcctaccttggaattttgcacgaaaaccgccttgggcaaaacgtgcttcattccacgctcaagggcgaggcgcgccgcgactacgtccgcgactgcgtttacttatttctatgctacacctggcagacggccatgggcgtttggcagcagtgcttggaggagtgcaacctcaaggagctgcagaaactgctaaagcaaaacttgaaggacctatggacggccttcaacgagcgctccgtggccgcgcacctggcggacatcattttccccgaacgcctgcttaaaaccctgcaacagggtctgccagacttcaccagtcaaagcatgttgcagaactttaggaactttatcctagagcgctcaggaatcttgcccgccacctgctgtgcacttcctagcgactttgtgcccattaagtaccgcgaatgccctccgccgctttggggccactgctaccttctgcagctagccaactaccttgcctaccactctgacataatggaagacgtgagcggtgacggtctactggagtgtcactgtcgctgcaacctatgcaccccgcaccgctccctggtttgcaattcgcagctgcttaacgaaagtcaaattatcggtacctttgagctgcagggtccctcgcctgacgaaaagtccgcggctccggggttgaaactcactccggggctgtggacgtcggcttaccttcgcaaatttgtacctgaggactaccacgcccacgagattaggttctacgaagaccaatcccgcccgccaaatgcggagcttaccgcctgcgtcattacccagggccacattcttggccaattgcaagccatcaacaaagcccgccaagagtttctgctacgaaagggacggggggtttacttggacccccagtccggcgaggagctcaacccaatccccccgccgccgcagccctatcagcagcagccgcgggcccttgcttcccaggatggcacccaaaaagaagctgcagctgccgccgccacccacggacgaggaggaatactgggacagtcaggcagaggaggttttggacgaggaggaggaggacatgatggaagactgggagagcctagacgaggaagcttccgaggtcgaagaggtgtcagacgaaacaccgtcaccctcggtcgcattcccctcgccggcgccccagaaatcggcaaccggttccagcatggctacaacctccgctcctcaggcgccgccggcactgcccgttcgccgacccaaccgtagatgggacaccactggaaccagggccggtaagtccaagcagccgccgccgttagcccaagagcaacaacagcgccaaggctaccgctcatggcgcgggcacaagaacgccatagttgcttgcttgcaagactgtgggggcaacatctccttcgcccgccgctttcttctctaccatcacggcgtggccttcccccgtaacatcctgcattactaccgtcatctctacagcccatactgcaccggcggcagcggcagcggcagcaacagcagcggccacacagaagcaaaggcgaccggatagcaagactctgacaaagcccaagaaatccacagcggcggcagcagcaggaggaggagcgctgcgtctggcgcccaacgaacccgtatcgacccgcgagcttagaaacaggatttttcccactctgtatgctatatttcaacagagcaggggccaagaacaagagctgaaaataaaaaacaggtctctgcgatccctcacccgcagctgcctgtatcacaaaagcgaagatcagcttcggcgcacgctggaagacgcggaggctctcttcagtaaatactgcgcgctgactcttaaggactagtttcgcgccctttctcaaatttaagcgcgaaaactacgtcatctccagcggccacacccggcgccagcacctgtcgtcagcgccattatgagcaaggaaattcccacgccctacatgtggagttaccagccacaaatgggacttgcggctggagctgcccaagactactcaacccgaataaactacatgagcgcgggaccccacatgatatcccgggtcaacggaatccgcgcccaccgaaaccgaattctcttggaacaggcggctattaccaccacacctcgtaataaccttaatccccgtagttggcccgctgccctggtgtaccaggaaagtcccgctcccaccactgtggtacttcccagagacgcccaggccgaagttcagatgactaactcaggggcgcagcttgcgggcggctttcgtcacagggtgcggtcgcccgggcagggtataactcacctgacaatcagagggcgaggtattcagctcaacgacgagtcggtgagctcctcgcttggtctccgtccggacgggacatttcagatcggcggcgccggccgtccttcattcacgcctcgtcaggcaatcctaactctgcagacctcgtcctctgagccgcgctctggaggcattggaactctgcaatttattgaggagtttgtgccatcggtctactttaaccccttctcgggacctcccggccactatccggatcaatttattcctaactttgacgcggtaaaggactcggcggacggctacgactgaatgttaagtggagaggcagagcaactgcgcctgaaacacctggtccactgtcgccgccacaagtgctttgcccgcgactccggtgagttttgctactttgaattgcccgaggatcatatcgagggcccggcgcacggcgtccggcttaccgcccagggagagcttgcccgtagcctgattcgggagtttacccagcgccccctgctagttgagcgggacaggggaccctgtgttctcactgtgatttgcaactgtcctaaccttggattacatcaagatctttgttgccatctctgtgctgagtataataaatacagaaattaaaatatactggggctcctatcgccatcctgtaaacgccaccgtcttcacccgcccaagcaaaccaaggcgaaccttacctggtacttttaacatctctccctctgtgatttacaacagtttcaacccagacggagtgagtctacgagagaacctctccgagctcagctactccatcagaaaaaacaccaccctccttacctgccgggaacgtacgagtgcgtcaccggccgctgcaccacacctaccgcctgaccgtaaaccagactttttccggacagacctcaataactctgtttaccagaacaggaggtgagcttagaaaacccttagggtattaggccaaaggcgcagctactgtggggtttatgaacaattcaagcaactctacgggctattctaattcaggtttctctagaaatggacggaattattacagagcagcgcctgctagaaagacgcagggcagcggccgagcaacagcgcatgaatcaagagctccaagacatggttaacttgcaccagtgcaaaaggggtatcttttgtctggtaaagcaggccaaagtcacctacgacagtaataccaccggacaccgccttagctacaagttgccaaccaagcgtcagaaattggtggtcatggtgggagaaaagcccattaccataactcagcactcggtagaaaccgaaggctgcattcactcaccttgtcaaggacctgaggatctctgcacccttattaagaccctgtgcggtctcaaagatcttattccctttaactaataaaaaaaaataataaagcatcacttacttaaaatcagttagcaaatttctgtccagtttattcagcagcacctccttgccctcctcccagctctggtattgcagcttcctcctggctgcaaactttctccacaatctaaatggaatgtcagtttcctcctgttcctgtccatccgcacccactatcttcatgttgttgcagatgaagcgcgcaagaccgtctgaagataccttcaaccccgtgtatccatatgacacggaaaccggtcctccaactgtgccttttcttactcctccctttgtatcccccaatgggtttcaagagagtccccctggggtactctctttgcgcctatccgaacctctagttacctccaatggcatgcttgcgctcaaaatgggcaacggcctctctctggacgaggccggcaaccttacctcccaaaatgtaaccactgtgagcccacctctcaaaaaaaccaagtcaaacataaacctggaaatatctgcacccctcacagttacctcagaagccctaactgtggctgccgccgcacctctaatggtcgcgggcaacacactcaccatgcaatcacaggccccgctaaccgtgcacgactccaaacttagcattgccacccaaggacccctcacagtgtcagaaggaaagctagccctgcaaacatcaggccccctcaccaccaccgatagcagtacccttactatcactgcctcaccccctctaactactgccactggtagcttgggcattgacttgaaagagcccatttatacacaaaatggaaaactaggactaaagtacggggctcctttgcatgtaacagacgacctaaacactttgaccgtagcaactggtccaggtgtgactattaataatacttccttgcaaactaaagttactggagccttgggttttgattcacaaggcaatatgcaacttaatgtagcaggaggactaaggattgattctcaaaacagacgccttatacttgatgttagttatccgtttgatgctcaaaaccaactaaatctaagactaggacagggccctctttttataaactcagcccacaacttggatattaactacaacaaaggcctttacttgtttacagcttcaaacaattccaaaaagcttgaggttaacctaagcactgccaaggggttgatgtttgacgctacagccatagccattaatgcaggagatgggcttgaatttggttcacctaatgcaccaaacacaaatcccctcaaaacaaaaattggccatggcctagaatttgattcaaacaaggctatggttcctaaactaggaactggccttagttttgacagcacaggtgccattacagtaggaaacaaaaataatgataagctaactttgtggaccacaccagctccatctcctaactgtagactaaatgcagagaaagatgctaaactcactttggtcttaacaaaatgtggcagtcaaatacttgctacagtttcagttttggctgttaaaggcagtttggctccaatatctggaacagttcaaagtgctcatcttattataagatttgacgaaaatggagtgctactaaacaattccttcctggacccagaatattggaactttagaaatggagatcttactgaaggcacagcctatacaaacgctgttggatttatgcctaacctatcagcttatccaaaatctcacggtaaaactgccaaaagtaacattgtcagtcaagtttacttaaacggagacaaaactaaacctgtaacactaaccattacactaaacggtacacaggaaacaggagacacaactccaagtgcatactctatgtcattttcatgggactggtctggccacaactacattaatgaaatatttgccacatcctcttacactttttcatacattgcccaagaataaagaatcgtttgtgttatgtttcaacgtgtttatttttcaattgcagaaaatttcgaatcatttttcattcagtagtatagccccaccaccacatagcttatacagatcaccgtaccttaatcaaactcacagaaccctagtattcaacctgccacctccctcccaacacacagagtacacagtcctttctccccggctggccttaaaaagcatcatatcatgggtaacagacatattcttaggtgttatattccacacggtttcctgtcgagccaaacgctcatcagtgatattaataaactccccgggcagctcacttaagttcatgtcgctgtccagctgctgagccacaggctgctgtccaacttgcggttgcttaacgggcggcgaaggagaagtccacgcctacatgggggtagagtcataatcgtgcatcaggatagggcggtggtgctgcagcagcgcgcgaataaactgctgccgccgccgctccgtcctgcaggaatacaacatggcagtggtctcctcagcgatgattcgcaccgcccgcagcataaggcgccttgtcctccgggcacagcagcgcaccctgatctcacttaaatcagcacagtaactgcagcacagcaccacaatattgttcaaaatcccacagtgcaaggcgctgtatccaaagctcatggcggggaccacagaacccacgtggccatcataccacaagcgcaggtagattaagtggcgacccctcataaacacgctggacataaacattacctcttttggcatgttgtaattcaccacctcccggtaccatataaacctctgattaaacatggcgccatccaccaccatcctaaaccagctggccaaaacctgcccgccggctatacactgcagggaaccgggactggaacaatgacagtggagagcccaggactcgtaaccatggatcatcatgctcgtcatgatatcaatgttggcacaacacaggcacacgtgcatacacttcctcaggattacaagctcctcccgcgttagaaccatatcccagggaacaacccattcctgaatcagcgtaaatcccacactgcagggaagacctcgcacgtaactcacgttgtgcattgtcaaagtgttacattcgggcagcagcggatgatcctccagtatggtagcgcgggtttctgtctcaaaaggaggtagacgatccctactgtacggagtgcgccgagacaaccgagatcgtgttggtcgtagtgtcatgccaaatggaacgccggacgtagtcatatttcctgaagcaaaaccaggtgcgggcgtgacaaacagatctgcgtctccggtctcgccgcttagatcgctctgtgtagtagttgtagtatatccactctctcaaagcatccaggcgccccctggcttcgggttctatgtaaactccttcatgcgccgctgccctgataacatccaccaccgcagaataagccacacccagccaacctacacattcgttctgcgagtcacacacgggaggagcgggaagagctggaagaaccatgtttttttttttattccaaaagattatccaaaacctcaaaatgaagatctattaagtgaacgcgctcccctccggtggcgtggtcaaactctacagccaaagaacagataatggcatttgtaagatgttgcacaatggcttccaaaaggcaaacggccctcacgtccaagtggacgtaaaggctaaacccttcagggtgaatctcctctataaacattccagcaccttcaaccatgcccaaataattctcatctcgccaccttctcaatatatctctaagcaaatcccgaatattaagtccggccattgtaaaaatctgctccagagcgccctccaccttcagcctcaagcagcgaatcatgattgcaaaaattcaggttcctcacagacctgtataagattcaaaagcggaacattaacaaaaataccgcgatcccgtaggtcccttcgcagggccagctgaacataatcgtgcaggtctgcacggaccagcgcggccacttccccgccaggaaccttgacaaaagaacccacactgattatgacacgcatactcggagctatgctaaccagcgtagccccgatgtaagctttgttgcatgggcggcgatataaaatgcaaggtgctgctcaaaaaatcaggcaaagcctcgcgcaaaaaagaaagcacatcgtagtcatgctcatgcagataaaggcaggtaagctccggaaccaccacagaaaaagacaccatttttctctcaaacatgtctgcgggtttctgcataaacacaaaataaaataacaaaaaaacatttaaacattagaagcctgtcttacaacaggaaaaacaacccttataagcataagacggactacggccatgccggcgtgaccgtaaaaaaactggtcaccgtgattaaaaagcaccaccgacagctcctcggtcatgtccggagtcataatgtaagactcggtaaacacatcaggttgattcacatcggtcagtgctaaaaagcgaccgaaatagcccgggggaatacatacccgcaggcgtagagacaacattacagcccccataggaggtataacaaaattaataggagagaaaaacacataaacacctgaaaaaccctcctgcctaggcaaaatagcaccctcccgctccagaacaacatacagcgcttccacagcggcagccataacagtcagccttaccagtaaaaaagaaaacctattaaaaaaacaccactcgacacggcaccagctcaatcagtcacagtgtaaaaaagggccaagtgcagagcgagtatatataggactaaaaaatgacgtaacggttaaagtccacaaaaaacacccagaaaaccgcacgcgaacctacgcccagaaacgaaagccaaaaaacccacaacttcctcaaatcgtcacttccgttttcccacgttacgtcacttcccattttaagaaaactacaattcccaacacatacaagttactccgccctaaaacctacgtcacccgccccgttcccacgccccgcgccacgtcacaaactccaccccctcattatcatattggcttcaatccaaaataaggtatattattgatgatgttaattaatttaaatccgcatgcgatatcgagctctcccgggaattcggatctgcgacgcgaggctggatggccttccccattatgattcttctcgcttccggcggcatcgggatgcccgcgttgcaggccatgctgtccaggcaggtagatgacgaccatcagggacagcttcacggccagcaaaaggccaggaaccgtaaaaaggccgcgttgctggcgtttttccataggctccgcccccctgacgagcatcacaaaaatcgacgctcaagtcagaggtggcgaaacccgacaggactataaagataccaggcgtttccccctggaagctccctcgtgcgctctcctgttccgaccctgccgcttaccggatacctgtccgcctttctcccttcgggaagcgtggcgctttctcaatgctcacgctgtaggtatctcagttcggtgtaggtcgttcgctccaagctgggctgtgtgcacgaaccccccgttcagcccgaccgctgcgccttatccggtaactatcgtcttgagtccaacccggtaagacacgacttatcgccactggcagcagccactggtaacaggattagcagagcgaggtatgtaggcggtgctacagagttcttgaagtggtggcctaactacggctacactagaaggacagtatttggtatctgcgctctgctgaagccagttaccttcggaaaaagagttggtagctcttgatccggcaaacaaaccaccgctggtagcggtggtttttttgtttgcaagcagcagattacgcgcagaaaaaaaggatctcaagaagatcctttgatcttttctacggggtctgacgctcagtggaacgaaaactcacgttaagggattttggtcatgagattatcaaaaaggatcttcacctagatccttttaaatcaatctaaagtatatatgagtaaacttggtctgacagttaccaatgcttaatcagtgaggcacctatctcagcgatctgtctatttcgttcatccatagttgcctgactccccgtcgtgtagataactacgatacgggagggcttaccatctggccccagtgctgcaatgataccgcgagacccacgctcaccggctccagatttatcagcaataaaccagccagccggaagggccgagcgcagaagtggtcctgcaactttatccgcctccatccagtctattaattgttgccgggaagctagagtaagtagttcgccagttaatagtttgcgcaacgttgttgccattgctgcaggcatcgtggtgtcacgctcgtcgtttggtatggcttcattcagctccggttcccaacgatcaaggcgagttacatgatcccccatgttgtgcaaaaaagcggttagctccttcggtcctccgatcgttgtcagaagtaagttggccgcagtgttatcactcatggttatggcagcactgcataattctcttactgtcatgccatccgtaagatgcttttctgtgactggtgagtactcaaccaagtcattctgagaatagtgtatgcggcgaccgagttgctcttgcccggcgtcaacacgggataataccgcgccacatagcagaactttaaaagtgctcatcattggaaaacgttcttcggggcgaaaactctcaaggatcttaccgctgttgagatccagttcgatgtaacccactcgtgcacccaactgatcttcagcatcttttactttcaccagcgtttctgggtgagcaaaaacaggaaggcaaaatgccgcaaaaaagggaataagggcgacacggaaatgttgaatactcatactcttcctttttcaatattattgaagcatttatcagggttattgtctcatgagcggatacatatttgaatgtatttagaaaaataaacaaataggggttccgcgcacatttccccgaaaagtgccacctgacgtctaagaaaccattattatcatgacattaacctataaaaataggcgtatcacgaggccctttcgtcttcaaggatccgaattcccgggagagctcgatatcgcatgcggatttaaattaattaa

SEQ ID NO: 120 - DNA, 37 bp, Artificial Sequence
  Primer
gcgcccaagcttgccaccatgcccatggggtctctgc

SEQ ID NO: 121 - DNA, 29 bp, Artificial Sequence
  Primer
aaacatgccggatccctcgttatcggttc

SEQ ID NO: 122 - DNA, 29 bp, Artificial Sequence
  Primer
cgagggatccggcatgtttgcgcagctgg

SEQ ID NO: 123 - DNA, 35 bp, Artificial Sequence
  Primer
gcgcccgcggccgcttagggggtcacccggaagag

SEQ ID NO: 124 - DNA, 20556 bp, Artificial Sequence
  MV-A
accaaacaaagttgggtaaggatagttcaatcaatgatcatcttctagtgcacttaggattcaagatcctattatcagggacaagagcaggattagggatatccgagatggccacacttttaaggagcttagcattgttcaaaagaaacaaggacaaaccacccattacatcaggatccggtggagccatcagaggaatcaaacacattattatagtaccaatccctggagattcctcaattaccactcgatccagacttctggaccggttggtgaggttaattggaaacccggatgtgagcgggcccaaactaacaggggcactaataggtatattatccttatttgtggagtctccaggtcaattgattcagaggatcaccgatgaccctgacgttagcataaggctgttagaggttgtccagagtgaccagtcacaatctggccttaccttcgcatcaagaggtaccaacatggaggatgaggcggaccaatacttttcacatgatgatccaattagtagtgatcaatccaggttcggatggttcgggaacaaggaaatctcagatattgaagtgcaagaccctgagggattcaacatgattctgggtaccatcctagcccaaatttgggtcttgctcgcaaaggcggttacggccccagacacggcagctgattcggagctaagaaggtggataaagtacacccaacaaagaagggtagttggtgaatttagattggagagaaaatggttggatgtggtgaggaacaggattgccgaggacctctccttacgccgattcatggtcgctctaatcctggatatcaagagaacacccggaaacaaacccaggattgctgaaatgatatgtgacattgatacatatatcgtagaggcaggattagccagttttatcctgactattaagtttgggatagaaactatgtatcctgctcttggactgcatgaatttgctggtgagttatccacacttgagtccttgatgaacctttaccagcaaatgggggaaactgcaccctacatggtaatcctggagaactcaattcagaacaagttcagtgcaggatcataccctctgctctggagctatgccatgggagtaggagtggaacttgaaaactccatgggaggtttgaactttggccgatcttactttgatccagcatattttagattagggcaagagatggtaaggaggtcagctggaaaggtcagttccacattggcatctgaactcggtatcactgccgaggatgcaaggcttgtttcagagattgcaatgcatactactgaggacaagatcagtagagcggttggacccagacaagcccaagtatcatttctacacggtgatcaaagtgagaatgagctaccgagattggggggcaaggaagataggagggtcaaacagagtcgaggagaagccagggagagctacagagaaaccgggcccagcagagcaagtgatgcgagagctgcccatcttccaaccggcacacccctagacattgacactgcaacggagtccagccaagatccgcaggacagtcgaaggtcagctgacgccctgcttaggctgcaagccatggcaggaatctcggaagaacaaggctcagacacggacacccctatagtgtacaatgacagaaatcttctagactaggtgcgagaggccgagggccagaacaacatccgcctaccatccatcattgttataaaaaacttaggaaccaggtccacacagccgccagcccatcaaccatccactcccacgattggagccaatggcagaagagcaggcacgccatgtcaaaaacggactggaatgcatccgggctctcaaggccgagcccatcggctcactggccatcgaggaagctatggcagcatggtcagaaatatcagacaacccaggacaggagcgagccacctgcagggaagagaaggcaggcagttcgggtctcagcaaaccatgcctctcagcaattggatcaactgaaggcggtgcacctcgcatccgcggtcagggacctggagagagcgatgacgacgctgaaactttgggaatccccccaagaaatctccaggcatcaagcactgggttacagtgttattacgtttatgatcacagcggtgaagcggttaagggaatccaagatgctgactctatcatggttcaatcaggccttgatggtgatagcaccctctcaggaggagacaatgaatctgaaaacagcgatgtggatattggcgaacctgataccgagggatatgctatcactgaccggggatctgctcccatctctatggggttcagggcttctgatgttgaaactgcagaaggaggggagatccacgagctcctgagactccaatccagaggcaacaactttccgaagcttgggaaaactctcaatgttcctccgcccccggaccccggtagggccagcacttccgggacacccattaaaaagggcacagacgcgagattagcctcatttggaacggagatcgcgtctttattgacaggtggtgcaacccaatgtgctcgaaagtcaccctcggaaccatcagggccaggtgcacctgcggggaatgtccccgagtgtgtgagcaatgccgcactgatacaggagtggacacccgaatctggtaccacaatctccccgagatcccagaataatgaagaagggggagactattatgatgatgagctgttctctgatgtccaagatattaaaacagccttggccaaaatacacgaggataatcagaagataatctccaagctagaatcactgctgttattgaagggagaagttgagtcaattaagaagcagatcaacaggcaaaatatcagcatatccaccctggaaggacacctctcaagcatcatgatcgccattcctggacttgggaaggatcccaacgaccccactgcagatgtcgaaatcaatcccgacttgaaacccatcataggcagagattcaggccgagcactggccgaagttctcaagaaacccgttgccagccgacaactccaaggaatgacaaatggacggaccagttccagaggacagctgctgaaggaatttcagctaaagccgatcgggaaaaagatgagctcagccgtcgggtttgttcctgacaccggccctgcatcacgcagtgtaatccgctccattataaaatccagccggctagaggaggatcggaagcgttacctgatgactctccttgatgatatcaaaggagccaatgatcttgccaagttccaccagatgctgatgaagataataatgaagtagctacagctcaacttacctgccaaccccatgccagtcgacccaactagtacaacctaaatccattataaaaaacttaggagcaaagtgattgcctcccaaggtccacaatgacagagacctacgacttcgacaagtcggcatgggacatcaaagggtcgatcgctccgatacaacccaccacctacagtgatggcaggctggtgccccaggtcagagtcatagatcctggtctaggcgacaggaaggatgaatgctttatgtacatgtttctgctgggggttgttgaggacagcgattccctagggcctccaatcgggcgagcatttgggttcctgcccttaggtgttggcagatccacagcaaagcccgaaaaactcctcaaagaggccactgagcttgacatagttgttagacgtacagcagggctcaatgaaaaactggtgttctacaacaacaccccactaactctcctcacaccttggagaaaggtcctaacaacagggagtgtcttcaacgcaaaccaagtgtgcaatgcggttaatctgataccgctcgataccccgcagaggttccgtgttgtttatatgagcatcacccgtctttcggataacgggtattacaccgttcctagaagaatgctggaattcagatcggtcaatgcagtggccttcaacctgctggtgacccttaggattgacaaggcgataggccctgggaagatcatcgacaatacagagcaacttcctgaggcaacatttatggtccacatcgggaacttcaggagaaagaagagtgaagtctactctgccgattattgcaaaatgaaaatcgaaaagatgggcctggtttttgcacttggtgggatagggggcaccagtcttcacattagaagcacaggcaaaatgagcaagactctccatgcacaactcgggttcaagaagaccttatgttacccgctgatggatatcaatgaagaccttaatcgattactctggaggagcagatgcaagatagtaagaatccaggcagttttgcagccatcagttcctcaagaattccgcatttacgacgacgtgatcataaatgatgaccaaggactattcaaagttctgtagaccgtagtgcccagcaatgcccgaaaacgacccccctcacaatgacagccagaaggcccggacaaaaaagccccctccgaaagactccacggaccaagcgagaggccagccagcagccgacggcaagcgcgaacaccaggcggccccagcacagaacagccctgacacaaggccaccaccagccaccccaatctgcatcctcctcgtgggacccccgaggaccaacccccaaggctgcccccgatccaaaccaccaaccgcatccccaccacccccgggaaagaaacccccagcaattggaaggcccctccccctcttcctcaacacaagaactccacaaccgaaccgcacaagcgaccgaggtgacccaaccgcaggcatccgactccctagacagatcctctctccccggcaaactaaacaaaacttagggccaaggaacatacacacccaacagaacccagaccccggcccacggcgccgcgcccccaacccccgacaaccagagggagcccccaaccaatcccgccggctcccccggtgcccacaggcagggacaccaacccccgaacagacccagcacccaaccatcgacaatccaagacgggggggcccccccaaaaaaaggcccccaggggccgacagccagcaccgcgaggaagcccacccaccccacacacgaccacggcaaccaaaccagaacccagaccaccctgggccaccagctcccagactcggccatcaccccgcagaaaggaaaggccacaacccgcgcaccccagccccgatccggcggggagccacccaacccgaaccagcacccaagagcgatccccgaaggacccccgaaccgcaaaggacatcagtatcccacagcctctccaagtcccccggtctcctcctcttctcgaagggaccaaaagatcaatccaccacacccgacgacactcaactccccacccctaaaggagacaccgggaatcccagaatcaagactcatccaatgtccatcatgggtctcaaggtgaacgtctctgccatattcatggcagtactgttaactctccaaacacccaccggtcaaatccattggggcaatctctctaagataggggtggtaggaataggaagtgcaagctacaaagttatgactcgttccagccatcaatcattagtcataaaattaatgcccaatataactctcctcaataactgcacgagggtagagattgcagaatacaggagactactgagaacagttttggaaccaattagagatgcacttaatgcaatgacccagaatataagaccggttcagagtgtagcttcaagtaggagacacaagagatttgcgggagtagtcctggcaggtgcggccctaggcgttgccacagctgctcagataacagccggcattgcacttcaccagtccatgctgaactctcaagccatcgacaatctgagagcgagcctggaaactactaatcaggcaattgagacaatcagacaagcagggcaggagatgatattggctgttcagggtgtccaagactacatcaataatgagctgataccgtctatgaaccaactatcttgtgatttaatcggccagaagctcgggctcaaattgctcagatactatacagaaatcctgtcattatttggccccagtttacgggaccccatatctgcggagatatctatccaggctttgagctatgcgcttggaggagacatcaataaggtgttagaaaagctcggatacagtggaggtgatttactgggcatcttagagagcggaggcatcaaggcccggataactcacgtcgacacagagtcctacttcattgtcctcagtatagcctatccgacgctgtccgagattaagggggtgattgtccaccggctagagggggtctcgtacaacataggctctcaagagtggtataccactgtgcccaagtatgttgcaacccaagggtaccttatctcgaattttgatgagtcatcgtgtactttcatgccagaggggactgtgtgcagccaaaatgccttgtacccgatgagtcctctgctccaagaatgcctccgggggtacaccaagtcctgtgctcgtacactcgtatccgggtcttttgggaaccggttcattttatcacaagggaacctaatagccaattgtgcatcaatcctttgcaagtgttacacaacaggaacgatcattaatcaagaccctgacaagatcctaacatacattgctgccgatcactgcccggtagtcgaggtgaacggcgtgaccatccaagtcgggagcaggaggtatccagacgctgtgtacttgcacagaattgacctcggtcctcccatatcattggagaggttggacgtagggacaaatctggggaatgcaattgctaagttggaggatgccaaggaattgttggagtcatcggaccagatattgaggagtatgaaaggtttatcgagcactagcatagtctacatcctgattgcagtgtgtcttggagggttgatagggatccccgctttaatatgttgctgcagggggcgttgtaacaaaaagggagaacaagttggtatgtcaagaccaggcctaaagcctgatcttacgggaacatcaaaatcctatgtaaggtcgctctgatcctctacaactcttgaaacacaaatgtcccacaagtctcctcttcgtcatcaagcaaccaccgcacccagcatcaagcccacctgaaattatctccggcttccctctggccgaacaatatcggtagttaatcaaaacttagggtgcaagatcatccacaatgtcaccacaacgagaccggataaatgccttctacaaagataacccccatcccaagggaagtaggatagtcattaacagagaacatcttatgattgatagaccttatgttttgctggctgttctgtttgtcatgtttctgagcttgatcgggttgctagccattgcaggcattagacttcatcgggcagccatctacaccgcagagatccataaaagcctcagcaccaatctagatgtaactaactcaatcgagcatcaggtcaaggacgtgctgacaccactcttcaaaatcatcggtgatgaagtgggcctgaggacacctcagagattcactgacctagtgaaattaatctctgacaagatcaagttccttaatccggatagggagtacgacttcagagatctcacttggtgtatcaacccgccagagagaatcaaattggattatgatcaatactgtgcagatgtggctgctgaagagctcatgaatgcattggtgaactcaactctactggagaccagaacaaccaatcagttcctagctgtctcaaagggaaactgctcagggcccactacaatcagaggtcaattctcaaacatgtcgctgtccctgttagacttgtatttaggtcgaggttacaatgtgtcatctatagtcactatgacatcccagggaatgtatgggggaacttacctagtggaaaagcctaatctgagcagcaaaaggtcagagttgtcacaactgagcatgtaccgagtgtttgaagtaggtgttatcagaaatccgggtttgggggctccggtgttccatatgacaaactatcttgagcaaccagtcagtaatgatctcagcaactgtatggtggctttgggggagctcaaactcgcagccctttgtcacggggaagattctatcacaattccctatcagggatcagggaaaggtgtcagcttccagctcgtcaagctaggtgtctggaaatccccaaccgacatgcaatcctgggtccccttatcaacggatgatccagtgatagacaggctttacctctcatctcacagaggtgttatcgctgacaatcaagcaaaatgggctgtcccgacaacacgaacagatgacaagttgcgaatggagacatgcttccaacaggcgtgtaagggtaaaatccaagcactctgcgagaatcccgagtgggcaccattgaaggataacaggattccttcatacggggtcttgtctgttgatctgagtctgacagttgagcttaaaatcaaaattgcttcgggattcgggccattgatcacacacggttcagggatggacctatacaaatccaaccacaacaatgtgtattggctgactatcccgccaatgaagaacctagccttaggtgtaatcaacacattggagtggataccgagattcaaggttagtccctacctcttcactgtcccaattaaggaagcaggcgaagactgccatgccccaacatacctacctgcggaggtggatggtgatgtcaaactcagttccaatctggtgattctacctggtcaagatctccaatatgttttggcaacctacgatacttccagggttgaacatgctgtggtttattacgtttacagcccaagccgctcattttcttacttttatccttttaggttgcctataaagggggtccccatcgaattacaagtggaatgcttcacatgggaccaaaaactctggtgccgtcacttctgtgtgcttgcggactcagaatctggtggacatatcactcactctgggatggtgggcatgggagtcagctgcacagtcacccgggaagatggaaccaatcgcagatagggctgctagtgaaccaatcacatgatgtcacccagacatcaggcatacccactagtctaccctccatcattgttataaaaaacttaggaaccaggtccacacagccgccagcccatcaacgcgtacggccaccatgcccatggggtctctgcaaccgctggccaccttgtacctgctggggatgctggtcgcttcctgcctcggatctggtgctggaggatcaggtggttctagtggaagtgatggtgctagcgggtctggcgttcgactttgggctacaagacaggcaatgctgggccaggtccatgaggttcctgaggggtggctcattttcgtggccgagcaggaggagctgtatgttcgcgtgcaaaacggctttaggaaggtccagctggaagcgcggacacctttgcccaggggaaccgataacgagggatccttggacctgcggcagggcatgtttgcgcagctggtggcccaaaatgttctgctgatcgatgggcccctgagctggtacagtgacccaggcctggcaggcgtgtccctgacggggggcctgagctacaaagaggacacgaaggagctggtggtggccaaggctggagtctactatgtcttctttcaactagagctgcggcgcgtggtggccggcgagggctcaggctccgtttcacttgcgctgcacctgcagccactgcgctctgctgctggggccgccgccctggctttgaccgtggacctgccacccgcctcctccgaggctcggaactcggccttcggtttccagggccgcttgctgcacctgagtgccggccagcgcctgggcgtccatcttcacactgaggccagggcacgccatgcctggcagcttacccagggcgccacagtcttgggactcttccgggtgacccccgaaatcccagccggactcccttcaccgaggtcggaataagcgcgcagcgcttagacgtctcgcgatcgatgctagtgtgaaatagacatcagaattaagaaaaacgtagggtccaagtggttccccgttatggactcgctatctgtcaaccagatcttataccctgaagttcacctagatagcccgatagttaccaataagatagtagccatcctggagtatgctcgagtccctcacgcttacagcctggaggaccctacactgtgtcagaacatcaagcaccgcctaaaaaacggattttccaaccaaatgattataaacaatgtggaagttgggaatgtcatcaagtccaagcttaggagttatccggcccactctcatattccatatccaaattgtaatcaggatttatttaacatagaagacaaagagtcaacgaggaagatccgtgaactcctcaaaaaggggaattcgctgtactccaaagtcagtgataaggttttccaatgcttaagggacactaactcacggcttggcctaggctccgaattgagggaggacatcaaggagaaagttattaacttgggagtttacatgcacagctcccagtggtttgagccctttctgttttggtttacagtcaagactgagatgaggtcagtgattaaatcacaaacccatacttgccataggaggagacacacacctgtattcttcactggtagttcagttgagttgctaatctctcgtgaccttgttgctataatcagtaaagagtctcaacatgtatattacctgacatttgaactggttttgatgtattgtgatgtcatagaggggaggttaatgacagagaccgctatgactattgatgctaggtatacagagcttctaggaagagtcagatacatgtggaaactgatagatggtttcttccctgcactcgggaatccaacttatcaaattgtagccatgctggagcctctttcacttgcttacctgcagctgagggatataacagtagaactcagaggtgctttccttaaccactgctttactgaaatacatgatgttcttgaccaaaacgggttttctgatgaaggtacttatcatgagttaactgaagctctagattacattttcataactgatgacatacatctgacaggggagattttctcatttttcagaagtttcggccaccccagacttgaagcagtaacggctgctgaaaatgttaggaaatacatgaatcagcctaaagtcattgtgtatgagactctgatgaaaggtcatgccatattttgtggaatcataatcaacggctatcgtgacaggcacggaggcagttggccaccgctgaccctccccctgcatgctgcagacacaatccggaatgctcaagcttcaggtgaagggttaacacatgagcagtgcgttgataactggaaatcttttgctggagtgaaatttggctgctttatgcctcttagcctggatagtgatctgacaatgtacctaaaggacaaggcacttgctgctctccaaagggaatgggattcagtttacccgaaagagttcctgcgttacgaccctcccaagggaaccgggtcacggaggcttgtagatgttttccttaatgattcgagctttgacccatatgatgtgataatgtatgttgtaagtggagcttacctccatgaccctgagttcaacctgtcttacagcctgaaagaaaaggagatcaaggaaacaggtagactttttgctaaaatgacttacaaaatgagggcatgccaagtgattgctgaaaatctaatctcaaacgggattggcaaatattttaaggacaatgggatggccaaggatgagcacgatttgactaaggcactccacactctagctgtctcaggagtccccaaagatctcaaagaaagtcacaggggggggccagtcttaaaaacctactcccgaagcccagtccacacaagtaccaggaacgtgagagcagcaaaagggtttatagggttccctcaagtaattcggcaggaccaagacactgatcatccggagaatatggaagcttacgagacagtcagtgcatttatcacgactgatctcaagaagtactgccttaattggagatatgagaccatcagcttgtttgcacagaggctaaatgagatttacggattgccctcatttttccagtggctgcataagaggcttgagacctctgtcctgtatgtaagtgaccctcattgcccccccgaccttgacgcccatatcccgttatataaagtccccaatgatcaaatcttcattaagtaccctatgggaggtatagaagggtattgtcagaagctgtggaccatcagcaccattccctatctatacctggctgcttatgagagcggagtaaggattgcttcgttagtgcaaggggacaatcagaccatagccgtaacaaaaagggtacccagcacatggccctacaaccttaagaaacgggaagctgctagagtaactagagattactttgtaattcttaggcaaaggctacatgatattggccatcacctcaaggcaaatgagacaattgtttcatcacatttttttgtctattcaaaaggaatatattatgatgggctacttgtgtcccaatcactcaagagcatcgcaagatgtgtattctggtcagagactatagttgatgaaacaagggcagcatgcagtaatattgctacaacaatggctaaaagcatcgagagaggttatgaccgttaccttgcatattccctgaacgtcctaaaagtgatacagcaaattctgatctctcttggcttcacaatcaattcaaccatgacccgggatgtagtcatacccctcctcacaaacaacgacctcttaataaggatggcactgttgcccgctcctattggggggatgaattatctgaatatgagcaggctgtttgtcagaaacatcggtgatccagtaacatcatcaattgctgatctcaagagaatgattctcgcctcactaatgcctgaagagaccctccatcaagtaatgacacaacaaccgggggactcttcattcctagactgggctagcgacccttactcagcaaatcttgtatgtgtccagagcatcactagactcctcaagaacataactgcaaggtttgtcctgatccatagtccaaacccaatgttaaaaggattattccatgatgacagtaaagaagaggacgagggactggcggcattcctcatggacaggcatattatagtacctagggcagctcatgaaatcctggatcatagtgtcacaggggcaagagagtctattgcaggcatgctggataccacaaaaggcttgattcgagccagcatgaggaagggggggttaacctctcgagtgataaccagattgtccaattatgactatgaacaattcagagcagggatggtgctattgacaggaagaaagagaaatgtcctcattgacaaagagtcatgttcagtgcagctggcgagagctctaagaagccatatgtgggcgaggctagctcgaggacggcctatttacggccttgaggtccctgatgtactagaatctatgcgaggccaccttattcggcgtcatgagacatgtgtcatctgcgagtgtggatcagtcaactacggatggttttttgtcccctcgggttgccaactggatgatattgacaaggaaacatcatccttgagagtcccatatattggttctaccactgatgagagaacagacatgaagcttgccttcgtaagagccccaagtcgatccttgcgatctgctgttagaatagcaacagtgtactcatgggcttacggtgatgatgatagctcttggaacgaagcctggttgttggctaggcaaagggccaatgtgagcctggaggagctaagggtgatcactcccatctcaacttcgactaatttagcgcataggttgagggatcgtagcactcaagtgaaatactcaggtacatcccttgtccgagtggcgaggtataccacaatctccaacgacaatctctcatttgtcatatcagataagaaggttgatactaactttatataccaacaaggaatgcttctagggttgggtgttttagaaacattgtttcgactcgagaaagataccggatcatctaacacggtattacatcttcacgtcgaaacagattgttgcgtgatcccgatgatagatcatcccaggatacccagctcccgcaagctagagctgagggcagagctatgtaccaacccattgatatatgataatgcacctttaattgacagagatgcaacaaggctatacacccagagccataggaggcaccttgtggaatttgttacatggtccacaccccaactatatcacattttagctaagtccacagcactatctatgattgacctggtaacaaaatttgagaaggaccatatgaatgaaatttcagctctcataggggatgacgatatcaatagtttcataactgagtttctgctcatagagccaagattattcactatctacttgggccagtgtgcggccatcaattgggcatttgatgtacattatcatagaccatcagggaaatatcagatgggtgagctgttgtcatcgttcctttctagaatgagcaaaggagtgtttaaggtgcttgtcaatgctctaagccacccaaagatctacaagaaattctggcattgtggtattatagagcctatccatggtccttcacttgatgctcaaaacttgcacacaactgtgtgcaacatggtttacacatgctatatgacctacctcgacctgttgttgaatgaagagttagaagagttcacatttctcttgtgtgaaagcgacgaggatgtagtaccggacagattcgacaacatccaggcaaaacacttatgtgttctggcagatttgtactgtcaaccagggacctgcccaccaattcgaggtctaagaccggtagagaaatgtgcagttctaaccgaccatatcaaggcagaggctatgttatctccagcaggatcttcgtggaacataaatccaattattgtagaccattactcatgctctctgacttatctccggcgaggatcgatcaaacagataagattgagagttgatccaggattcattttcgacgccctcgctgaggtaaatgtcagtcagccaaagatcggcagcaacaacatctcaaatatgagcatcaaggctttcagacccccacacgatgatgttgcaaaattgctcaaagatatcaacacaagcaagcacaatcttcccatttcagggggcaatctcgccaattatgaaatccatgctttccgcagaatcgggttgaactcatctgcttgctacaaagctgttgagatatcaacattaattaggagatgccttgagccaggggaggacggcttgttcttgggtgagggatcgggttctatgttgatcacttataaagagatacttaaactaaacaagtgcttctataatagtggggtttccgccaattctagatctggtcaaagggaattagcaccctatccctccgaagttggccttgtcgaacacagaatgggagtaggtaatattgtcaaagtgctctttaacgggaggcccgaagtcacgtgggtaggcagtgtagattgcttcaatttcatagttagtaatatccctacctctagtgtggggtttatccattcagatatagagaccttgcctgacaaagatactatagagaagctagaggaattggcagccatcttatcgatggctctgctcctgggcaaaataggatcaatactggtgattaagcttatgcctttcagcggggattttgttcagggatttataagttatgtagggtctcattatagagaagtgaaccttgtataccctagatacagcaacttcatctctactgaatcttatttggttatgacagatctcaaggctaaccggctaatgaatcctgaaaagattaagcagcagataattgaatcatctgtgaggacttcacctggacttataggtcacatcctatccattaagcaactaagctgcatacaagcaattgtgggagacgcagttagtagaggtgatatcaatcctactctgaaaaaacttacacctatagagcaggtgctgatcaattgcgggttggcaattaacggacctaagctgtgcaaagaattgatccaccatgatgttgcctcagggcaagatggattgcttaattctatactcatcctctacagggagttggcaagattcaaagacaaccaaagaagtcaacaagggatgttccacgcttaccccgtattggtaagtagcaggcaacgagaacttatatctaggatcacccgcaaattctgggggcacattcttctttactccgggaacaaaaagttgataaataagtttatccagaatctcaagtccggctatctgatactagacttacaccagaatatcttcgttaagaatctatccaagtcagagaaacagattattatgacggggggtttgaaacgtgagtgggtttttaaggtaacagtcaaggagaccaaagaatggtataagttagtcggatacagtgccctgattaaggactaattggttgaactccggaaccctaatcctgccctaggtggttaggcattatttgcaatatattaaagaaaactttgaaaatacgaagtttctattcccagctttgtctggtggccggcatggtcccagcctcctcgctggcgccggctgggcaacattccgaggggaccgtcccctcggtaatggcgaatgggacgcggccggtcgatcgacgatccggctgctaacaaagcccgaaaggaagctgagttggctgctgccaccgctgagcaataactagcataaccccttggggcctctaaacgggtcttgaggggttttttgctgaaaggaggaactatatccggatcgagatcaattctgtgagcgtatggcaaacgaaggaaaaatagttatagtagccgcactcgatgggacatttcaacgtaaaccgtttaataatattttgaatcttattccattatctgaaatggtggtaaaactaactgctgtgtgtatgaaatgctttaaggaggcttccttttctaaacgattgggtgaggaaaccgagatagaaataataggaggtaatgatatgtatcaatcggtgtgtagaaagtgttacatcgactcataatattatattttttatctaaaaaactaaaaataaacattgattaaattttaatataatacttaaaaatggatgttgtgtcgttagataaaccgtttatgtattttgaggaaattgataatgagttagattacgaaccagaaagtgcaaatgaggtcgcaaaaaaactgccgtatcaaggacagttaaaactattactaggagaattattttttcttagtaagttacagcgacacggtatattagatggtgccaccgtagtgtatataggatctgctcccggtacacatatacgttatttgagagatcatttctataatttaggagtgatcccgaaaggaagctgagttggctgctgccaccgctgagcaataactagcataaccccttggggcctctaaacgggtcttgaggggttttttgctgaaaggaggaacgcgcctgatgcggtattttctccttacgcatctgtgcggtatttcacaccgcatatatggtgcactctcagtacaatctgctctgatgccgcatagttaagccagccccgacacccgccaacacccgctgacgcgccctgacgggcttgtctgctcccggcatccgcttacagacaagctgtgaccgtctccgggagctgcatgtgtcagaggttttcaccgtcatcaccgaaacgcgcgagacgaaagggcctcgtgatacgcctatttttataggttaatgtcatgataataatggtttcttagacgtcaggtggcacttttcggggaaatgtgcgcggaacccctatttgtttatttttctaaatacattcaaatatgtatccgctcatgagacaataaccctgataaatgcttcaataatattgaaaaaggaagagtatgagtattcaacatttccgtgtcgcccttattcccttttttgcggcattttgccttcctgtttttgctcacccagaaacgctggtgaaagtaaaagatgctgaagatcagttgggtgcacgagtgggttacatcgaactggatctcaacagcggtaagatccttgagagttttcgccccgaagaacgttttccaatgatgagcacttttaaagttctgctatgtggcgcggtattatcccgtattgacgccgggcaagagcaactcggtcgccgcatacactattctcagaatgacttggttgagtactcaccagtcacagaaaagcatcttacggatggcatgacagtaagagaattatgcagtgctgccataaccatgagtgataacactgcggccaacttacttctgacaacgatcggaggaccgaaggagctaaccgcttttttgcacaacatgggggatcatgtaactcgccttgatcgttgggaaccggagctgaatgaagccataccaaacgacgagcgtgacaccacgatgcctgtagcaatggcaacaacgttgcgcaaactattaactggcgaactacttactctagcttcccggcaacaattaatagactggatggaggcggataaagttgcaggaccacttctgcgctcggcccttccggctggctggtttattgctgataaatctggagccggtgagcgtgggtctcgcggtatcattgcagcactggggccagatggtaagccctcccgtatcgtagttatctacacgacggggagtcaggcaactatggatgaacgaaatagacagatcgctgagataggtgcctcactgattaagcattggtaactgtcagaccaagtttactcatatatactttagattgatttaaaacttcatttttaatttaaaaggatctaggtgaagatcctttttgataatctcatgaccaaaatcccttaacgtgagttttcgttccactgagcgtcagaccccgtagaaaagatcaaaggatcttcttgagatcctttttttctgcgcgtaatctgctgcttgcaaacaaaaaaaccaccgctaccagcggtggtttgtttgccggatcaagagctaccaactctttttccgaaggtaactggcttcagcagagcgcagataccaaatactgtccttctagtgtagccgtagttaggccaccacttcaagaactctgtagcaccgcctacatacctcgctctgctaatcctgttaccagtggctgctgccagtggcgataagtcgtgtcttaccgggttggactcaagacgatagttaccggataaggcgcagcggtcgggctgaacggggggttcgtgcacacagcccagcttggagcgaacgacctacaccgaactgagatacctacagcgtgagcattgagaaagcgccacgcttcccgaagggagaaaggcggacaggtatccggtaagcggcagggtcggaacaggagagcgcacgagggagcttccagggggaaacgcctggtatctttatagtcctgtcgggtttcgccacctctgacttgagcgtcgatttttgtgatgctcgtcaggggggcggagcctatggaaaaacgccagcaacgcggcctttttacggttcctggccttttgctggccttttgctcacatgttctttcctgcgttatcccctgattctgtggataaccgtattaccgcctttgagtgagctgataccgctcgccgcagccgaacgaccgagcgcagcgagtcagtgagcgaggaagcggaagagcgcccaatacgcaaaccgcctctccccgcgcgttggccgattcattaatgcagctggcacgacaggtttcccgactggaaagcgggcagtgagcgcaacgcaattaatgtgagttagctcactcattaggcaccccaggctttacactttatgcttccggctcgtatgttgtgtggaattgtgagcggataacaatttcacacaggaaacagctatgaccatgattacgccaagcttacgcgtcctggcattatgcccagtacatgaccttatgggactttcctacttggcagtacatctacgtattagtcatcgctattaccatggtgatgcggttttggcagtacatcaatgggcgtggatagcggtttgactcacggggatttccaagtctccaccccattgacgtcaatgggagtttgttttggcaccaaaatcaacgggactttccaaaatgtcgtaacaactccgccccattgacgcaaatgggcggtaggcgtgtacggtgggaggtctatataagcagagctcgtttagtgaaccgtgg

SEQ ID NO: 125 - DNA, 20505 bp, Artificial Sequence
  MV-B
accaaacaaagttgggtaaggatagttcaatcaatgatcatcttctagtgcacttaggattcaagatcctattatcagggacaagagcaggattagggatatccgagatggccacacttttaaggagcttagcattgttcaaaagaaacaaggacaaaccacccattacatcaggatccggtggagccatcagaggaatcaaacacattattatagtaccaatccctggagattcctcaattaccactcgatccagacttctggaccggttggtgaggttaattggaaacccggatgtgagcgggcccaaactaacaggggcactaataggtatattatccttatttgtggagtctccaggtcaattgattcagaggatcaccgatgaccctgacgttagcataaggctgttagaggttgtccagagtgaccagtcacaatctggccttaccttcgcatcaagaggtaccaacatggaggatgaggcggaccaatacttttcacatgatgatccaattagtagtgatcaatccaggttcggatggttcgggaacaaggaaatctcagatattgaagtgcaagaccctgagggattcaacatgattctgggtaccatcctagcccaaatttgggtcttgctcgcaaaggcggttacggccccagacacggcagctgattcggagctaagaaggtggataaagtacacccaacaaagaagggtagttggtgaatttagattggagagaaaatggttggatgtggtgaggaacaggattgccgaggacctctccttacgccgattcatggtcgctctaatcctggatatcaagagaacacccggaaacaaacccaggattgctgaaatgatatgtgacattgatacatatatcgtagaggcaggattagccagttttatcctgactattaagtttgggatagaaactatgtatcctgctcttggactgcatgaatttgctggtgagttatccacacttgagtccttgatgaacctttaccagcaaatgggggaaactgcaccctacatggtaatcctggagaactcaattcagaacaagttcagtgcaggatcataccctctgctctggagctatgccatgggagtaggagtggaacttgaaaactccatgggaggtttgaactttggccgatcttactttgatccagcatattttagattagggcaagagatggtaaggaggtcagctggaaaggtcagttccacattggcatctgaactcggtatcactgccgaggatgcaaggcttgtttcagagattgcaatgcatactactgaggacaagatcagtagagcggttggacccagacaagcccaagtatcatttctacacggtgatcaaagtgagaatgagctaccgagattggggggcaaggaagataggagggtcaaacagagtcgaggagaagccagggagagctacagagaaaccgggcccagcagagcaagtgatgcgagagctgcccatcttccaaccggcacacccctagacattgacactgcaacggagtccagccaagatccgcaggacagtcgaaggtcagctgacgccctgcttaggctgcaagccatggcaggaatctcggaagaacaaggctcagacacggacacccctatagtgtacaatgacagaaatcttctagactaggtgcgagaggccgagggccagaacaacatccgcctaccatccatcattgttataaaaaacttaggaaccaggtccacacagccgccagcccatcaaccatccactcccacgattggagccaatggcagaagagcaggcacgccatgtcaaaaacggactggaatgcatccgggctctcaaggccgagcccatcggctcactggccatcgaggaagctatggcagcatggtcagaaatatcagacaacccaggacaggagcgagccacctgcagggaagagaaggcaggcagttcgggtctcagcaaaccatgcctctcagcaattggatcaactgaaggcggtgcacctcgcatccgcggtcagggacctggagagagcgatgacgacgctgaaactttgggaatccccccaagaaatctccaggcatcaagcactgggttacagtgttattacgtttatgatcacagcggtgaagcggttaagggaatccaagatgctgactctatcatggttcaatcaggccttgatggtgatagcaccctctcaggaggagacaatgaatctgaaaacagcgatgtggatattggcgaacctgataccgagggatatgctatcactgaccggggatctgctcccatctctatggggttcagggcttctgatgttgaaactgcagaaggaggggagatccacgagctcctgagactccaatccagaggcaacaactttccgaagcttgggaaaactctcaatgttcctccgcccccggaccccggtagggccagcacttccgggacacccattaaaaagggcacagacgcgagattagcctcatttggaacggagatcgcgtctttattgacaggtggtgcaacccaatgtgctcgaaagtcaccctcggaaccatcagggccaggtgcacctgcggggaatgtccccgagtgtgtgagcaatgccgcactgatacaggagtggacacccgaatctggtaccacaatctccccgagatcccagaataatgaagaagggggagactattatgatgatgagctgttctctgatgtccaagatattaaaacagccttggccaaaatacacgaggataatcagaagataatctccaagctagaatcactgctgttattgaagggagaagttgagtcaattaagaagcagatcaacaggcaaaatatcagcatatccaccctggaaggacacctctcaagcatcatgatcgccattcctggacttgggaaggatcccaacgaccccactgcagatgtcgaaatcaatcccgacttgaaacccatcataggcagagattcaggccgagcactggccgaagttctcaagaaacccgttgccagccgacaactccaaggaatgacaaatggacggaccagttccagaggacagctgctgaaggaatttcagctaaagccgatcgggaaaaagatgagctcagccgtcgggtttgttcctgacaccggccctgcatcacgcagtgtaatccgctccattataaaatccagccggctagaggaggatcggaagcgttacctgatgactctccttgatgatatcaaaggagccaatgatcttgccaagttccaccagatgctgatgaagataataatgaagtagctacagctcaacttacctgccaaccccatgccagtcgacccaactagtacaacctaaatccattataaaaaacttaggagcaaagtgattgcctcccaaggtccacaatgacagagacctacgacttcgacaagtcggcatgggacatcaaagggtcgatcgctccgatacaacccaccacctacagtgatggcaggctggtgccccaggtcagagtcatagatcctggtctaggcgacaggaaggatgaatgctttatgtacatgtttctgctgggggttgttgaggacagcgattccctagggcctccaatcgggcgagcatttgggttcctgcccttaggtgttggcagatccacagcaaagcccgaaaaactcctcaaagaggccactgagcttgacatagttgttagacgtacagcagggctcaatgaaaaactggtgttctacaacaacaccccactaactctcctcacaccttggagaaaggtcctaacaacagggagtgtcttcaacgcaaaccaagtgtgcaatgcggttaatctgataccgctcgataccccgcagaggttccgtgttgtttatatgagcatcacccgtctttcggataacgggtattacaccgttcctagaagaatgctggaattcagatcggtcaatgcagtggccttcaacctgctggtgacccttaggattgacaaggcgataggccctgggaagatcatcgacaatacagagcaacttcctgaggcaacatttatggtccacatcgggaacttcaggagaaagaagagtgaagtctactctgccgattattgcaaaatgaaaatcgaaaagatgggcctggtttttgcacttggtgggatagggggcaccagtcttcacattagaagcacaggcaaaatgagcaagactctccatgcacaactcgggttcaagaagaccttatgttacccgctgatggatatcaatgaagaccttaatcgattactctggaggagcagatgcaagatagtaagaatccaggcagttttgcagccatcagttcctcaagaattccgcatttacgacgacgtgatcataaatgatgaccaaggactattcaaagttctgtagaccgtagtgcccagcaatgcccgaaaacgacccccctcacaatgacagccagaaggcccggacaaaaaagccccctccgaaagactccacggaccaagcgagaggccagccagcagccgacggcaagcgcgaacaccaggcggccccagcacagaacagccctgacacaaggccaccaccagccaccccaatctgcatcctcctcgtgggacccccgaggaccaacccccaaggctgcccccgatccaaaccaccaaccgcatccccaccacccccgggaaagaaacccccagcaattggaaggcccctccccctcttcctcaacacaagaactccacaaccgaaccgcacaagcgaccgaggtgacccaaccgcaggcatccgactccctagacagatcctctctccccggcaaactaaacaaaacttagggccaaggaacatacacacccaacagaacccagaccccggcccacggcgccgcgcccccaacccccgacaaccagagggagcccccaaccaatcccgccggctcccccggtgcccacaggcagggacaccaacccccgaacagacccagcacccaaccatcgacaatccaagacgggggggcccccccaaaaaaaggcccccaggggccgacagccagcaccgcgaggaagcccacccaccccacacacgaccacggcaaccaaaccagaacccagaccaccctgggccaccagctcccagactcggccatcaccccgcagaaaggaaaggccacaacccgcgcaccccagccccgatccggcggggagccacccaacccgaaccagcacccaagagcgatccccgaaggacccccgaaccgcaaaggacatcagtatcccacagcctctccaagtcccccggtctcctcctcttctcgaagggaccaaaagatcaatccaccacacccgacgacactcaactccccacccctaaaggagacaccgggaatcccagaatcaagactcatccaatgtccatcatgggtctcaaggtgaacgtctctgccatattcatggcagtactgttaactctccaaacacccaccggtcaaatccattggggcaatctctctaagataggggtggtaggaataggaagtgcaagctacaaagttatgactcgttccagccatcaatcattagtcataaaattaatgcccaatataactctcctcaataactgcacgagggtagagattgcagaatacaggagactactgagaacagttttggaaccaattagagatgcacttaatgcaatgacccagaatataagaccggttcagagtgtagcttcaagtaggagacacaagagatttgcgggagtagtcctggcaggtgcggccctaggcgttgccacagctgctcagataacagccggcattgcacttcaccagtccatgctgaactctcaagccatcgacaatctgagagcgagcctggaaactactaatcaggcaattgagacaatcagacaagcagggcaggagatgatattggctgttcagggtgtccaagactacatcaataatgagctgataccgtctatgaaccaactatcttgtgatttaatcggccagaagctcgggctcaaattgctcagatactatacagaaatcctgtcattatttggccccagtttacgggaccccatatctgcggagatatctatccaggctttgagctatgcgcttggaggagacatcaataaggtgttagaaaagctcggatacagtggaggtgatttactgggcatcttagagagcggaggcatcaaggcccggataactcacgtcgacacagagtcctacttcattgtcctcagtatagcctatccgacgctgtccgagattaagggggtgattgtccaccggctagagggggtctcgtacaacataggctctcaagagtggtataccactgtgcccaagtatgttgcaacccaagggtaccttatctcgaattttgatgagtcatcgtgtactttcatgccagaggggactgtgtgcagccaaaatgccttgtacccgatgagtcctctgctccaagaatgcctccgggggtacaccaagtcctgtgctcgtacactcgtatccgggtcttttgggaaccggttcattttatcacaagggaacctaatagccaattgtgcatcaatcctttgcaagtgttacacaacaggaacgatcattaatcaagaccctgacaagatcctaacatacattgctgccgatcactgcccggtagtcgaggtgaacggcgtgaccatccaagtcgggagcaggaggtatccagacgctgtgtacttgcacagaattgacctcggtcctcccatatcattggagaggttggacgtagggacaaatctggggaatgcaattgctaagttggaggatgccaaggaattgttggagtcatcggaccagatattgaggagtatgaaaggtttatcgagcactagcatagtctacatcctgattgcagtgtgtcttggagggttgatagggatccccgctttaatatgttgctgcagggggcgttgtaacaaaaagggagaacaagttggtatgtcaagaccaggcctaaagcctgatcttacgggaacatcaaaatcctatgtaaggtcgctctgatcctctacaactcttgaaacacaaatgtcccacaagtctcctcttcgtcatcaagcaaccaccgcacccagcatcaagcccacctgaaattatctccggcttccctctggccgaacaatatcggtagttaatcaaaacttagggtgcaagatcatccacaatgtcaccacaacgagaccggataaatgccttctacaaagataacccccatcccaagggaagtaggatagtcattaacagagaacatcttatgattgatagaccttatgttttgctggctgttctgtttgtcatgtttctgagcttgatcgggttgctagccattgcaggcattagacttcatcgggcagccatctacaccgcagagatccataaaagcctcagcaccaatctagatgtaactaactcaatcgagcatcaggtcaaggacgtgctgacaccactcttcaaaatcatcggtgatgaagtgggcctgaggacacctcagagattcactgacctagtgaaattaatctctgacaagatcaagttccttaatccggatagggagtacgacttcagagatctcacttggtgtatcaacccgccagagagaatcaaattggattatgatcaatactgtgcagatgtggctgctgaagagctcatgaatgcattggtgaactcaactctactggagaccagaacaaccaatcagttcctagctgtctcaaagggaaactgctcagggcccactacaatcagaggtcaattctcaaacatgtcgctgtccctgttagacttgtatttaggtcgaggttacaatgtgtcatctatagtcactatgacatcccagggaatgtatgggggaacttacctagtggaaaagcctaatctgagcagcaaaaggtcagagttgtcacaactgagcatgtaccgagtgtttgaagtaggtgttatcagaaatccgggtttgggggctccggtgttccatatgacaaactatcttgagcaaccagtcagtaatgatctcagcaactgtatggtggctttgggggagctcaaactcgcagccctttgtcacggggaagattctatcacaattccctatcagggatcagggaaaggtgtcagcttccagctcgtcaagctaggtgtctggaaatccccaaccgacatgcaatcctgggtccccttatcaacggatgatccagtgatagacaggctttacctctcatctcacagaggtgttatcgctgacaatcaagcaaaatgggctgtcccgacaacacgaacagatgacaagttgcgaatggagacatgcttccaacaggcgtgtaagggtaaaatccaagcactctgcgagaatcccgagtgggcaccattgaaggataacaggattccttcatacggggtcttgtctgttgatctgagtctgacagttgagcttaaaatcaaaattgcttcgggattcgggccattgatcacacacggttcagggatggacctatacaaatccaaccacaacaatgtgtattggctgactatcccgccaatgaagaacctagccttaggtgtaatcaacacattggagtggataccgagattcaaggttagtccctacctcttcactgtcccaattaaggaagcaggcgaagactgccatgccccaacatacctacctgcggaggtggatggtgatgtcaaactcagttccaatctggtgattctacctggtcaagatctccaatatgttttggcaacctacgatacttccagggttgaacatgctgtggtttattacgtttacagcccaagccgctcattttcttacttttatccttttaggttgcctataaagggggtccccatcgaattacaagtggaatgcttcacatgggaccaaaaactctggtgccgtcacttctgtgtgcttgcggactcagaatctggtggacatatcactcactctgggatggtgggcatgggagtcagctgcacagtcacccgggaagatggaaccaatcgcagatagggctgctagtgaaccaatcacatgatgtcacccagacatcaggcatacccactagtctaccctccatcattgttataaaaaacttaggaaccaggtccacacagccgccagcccatcaacgcgtacggccaccatgcctatgggatctctccaacccctggcaacactctacttgttggggatgcttgtcgctagttgtctcggaggcgttagactctgggccacacgacaggctatgctcgggcaggttcacgaggtgcccgaaggatggctgatctttgtagctgaacaggaggagctgtacgtgagggttcagaatggctttagaaaggttcaactggaagcaagaactccactgccacgcggaacagacaacgagggatccctcgaccttaggcaaggcatgttcgcacagctggttgcgcagaatgtccttttgattgatggaccacttagctggtattctgatcctgggcttgccggcgtttctcttactggtggcctgagctataaagaagatacaaaggagctggtggttgccaaggccggggtctattacgtgttctttcaactcgagttgaggcgagttgtggctggggaaggatctggatcagtttccctggcgcttcatctccagccgcttagaagcgcagctggagctgcagcccttgcccttaccgtggatcttccaccagcgagctctgaggcccgcaatagcgcttttgggtttcaaggaagactcctccacctttccgctggacagcggcttggtgttcacctgcatacggaggctcgggcacggcatgcatggcaactcacacaaggggccacagtgttggggctgtttcgggtgactccagaaattcccgccggactgcctagtccaagaagcgaataataagcgcgcagcgcttagacgtctcgcgatcgatgctagtgtgaaatagacatcagaattaagaaaaacgtagggtccaagtggttccccgttatggactcgctatctgtcaaccagatcttataccctgaagttcacctagatagcccgatagttaccaataagatagtagccatcctggagtatgctcgagtccctcacgcttacagcctggaggaccctacactgtgtcagaacatcaagcaccgcctaaaaaacggattttccaaccaaatgattataaacaatgtggaagttgggaatgtcatcaagtccaagcttaggagttatccggcccactctcatattccatatccaaattgtaatcaggatttatttaacatagaagacaaagagtcaacgaggaagatccgtgaactcctcaaaaaggggaattcgctgtactccaaagtcagtgataaggttttccaatgcttaagggacactaactcacggcttggcctaggctccgaattgagggaggacatcaaggagaaagttattaacttgggagtttacatgcacagctcccagtggtttgagccctttctgttttggtttacagtcaagactgagatgaggtcagtgattaaatcacaaacccatacttgccataggaggagacacacacctgtattcttcactggtagttcagttgagttgctaatctctcgtgaccttgttgctataatcagtaaagagtctcaacatgtatattacctgacatttgaactggttttgatgtattgtgatgtcatagaggggaggttaatgacagagaccgctatgactattgatgctaggtatacagagcttctaggaagagtcagatacatgtggaaactgatagatggtttcttccctgcactcgggaatccaacttatcaaattgtagccatgctggagcctctttcacttgcttacctgcagctgagggatataacagtagaactcagaggtgctttccttaaccactgctttactgaaatacatgatgttcttgaccaaaacgggttttctgatgaaggtacttatcatgagttaactgaagctctagattacattttcataactgatgacatacatctgacaggggagattttctcatttttcagaagtttcggccaccccagacttgaagcagtaacggctgctgaaaatgttaggaaatacatgaatcagcctaaagtcattgtgtatgagactctgatgaaaggtcatgccatattttgtggaatcataatcaacggctatcgtgacaggcacggaggcagttggccaccgctgaccctccccctgcatgctgcagacacaatccggaatgctcaagcttcaggtgaagggttaacacatgagcagtgcgttgataactggaaatcttttgctggagtgaaatttggctgctttatgcctcttagcctggatagtgatctgacaatgtacctaaaggacaaggcacttgctgctctccaaagggaatgggattcagtttacccgaaagagttcctgcgttacgaccctcccaagggaaccgggtcacggaggcttgtagatgttttccttaatgattcgagctttgacccatatgatgtgataatgtatgttgtaagtggagcttacctccatgaccctgagttcaacctgtcttacagcctgaaagaaaaggagatcaaggaaacaggtagactttttgctaaaatgacttacaaaatgagggcatgccaagtgattgctgaaaatctaatctcaaacgggattggcaaatattttaaggacaatgggatggccaaggatgagcacgatttgactaaggcactccacactctagctgtctcaggagtccccaaagatctcaaagaaagtcacaggggggggccagtcttaaaaacctactcccgaagcccagtccacacaagtaccaggaacgtgagagcagcaaaagggtttatagggttccctcaagtaattcggcaggaccaagacactgatcatccggagaatatggaagcttacgagacagtcagtgcatttatcacgactgatctcaagaagtactgccttaattggagatatgagaccatcagcttgtttgcacagaggctaaatgagatttacggattgccctcatttttccagtggctgcataagaggcttgagacctctgtcctgtatgtaagtgaccctcattgcccccccgaccttgacgcccatatcccgttatataaagtccccaatgatcaaatcttcattaagtaccctatgggaggtatagaagggtattgtcagaagctgtggaccatcagcaccattccctatctatacctggctgcttatgagagcggagtaaggattgcttcgttagtgcaaggggacaatcagaccatagccgtaacaaaaagggtacccagcacatggccctacaaccttaagaaacgggaagctgctagagtaactagagattactttgtaattcttaggcaaaggctacatgatattggccatcacctcaaggcaaatgagacaattgtttcatcacatttttttgtctattcaaaaggaatatattatgatgggctacttgtgtcccaatcactcaagagcatcgcaagatgtgtattctggtcagagactatagttgatgaaacaagggcagcatgcagtaatattgctacaacaatggctaaaagcatcgagagaggttatgaccgttaccttgcatattccctgaacgtcctaaaagtgatacagcaaattctgatctctcttggcttcacaatcaattcaaccatgacccgggatgtagtcatacccctcctcacaaacaacgacctcttaataaggatggcactgttgcccgctcctattggggggatgaattatctgaatatgagcaggctgtttgtcagaaacatcggtgatccagtaacatcatcaattgctgatctcaagagaatgattctcgcctcactaatgcctgaagagaccctccatcaagtaatgacacaacaaccgggggactcttcattcctagactgggctagcgacccttactcagcaaatcttgtatgtgtccagagcatcactagactcctcaagaacataactgcaaggtttgtcctgatccatagtccaaacccaatgttaaaaggattattccatgatgacagtaaagaagaggacgagggactggcggcattcctcatggacaggcatattatagtacctagggcagctcatgaaatcctggatcatagtgtcacaggggcaagagagtctattgcaggcatgctggataccacaaaaggcttgattcgagccagcatgaggaagggggggttaacctctcgagtgataaccagattgtccaattatgactatgaacaattcagagcagggatggtgctattgacaggaagaaagagaaatgtcctcattgacaaagagtcatgttcagtgcagctggcgagagctctaagaagccatatgtgggcgaggctagctcgaggacggcctatttacggccttgaggtccctgatgtactagaatctatgcgaggccaccttattcggcgtcatgagacatgtgtcatctgcgagtgtggatcagtcaactacggatggttttttgtcccctcgggttgccaactggatgatattgacaaggaaacatcatccttgagagtcccatatattggttctaccactgatgagagaacagacatgaagcttgccttcgtaagagccccaagtcgatccttgcgatctgctgttagaatagcaacagtgtactcatgggcttacggtgatgatgatagctcttggaacgaagcctggttgttggctaggcaaagggccaatgtgagcctggaggagctaagggtgatcactcccatctcaacttcgactaatttagcgcataggttgagggatcgtagcactcaagtgaaatactcaggtacatcccttgtccgagtggcgaggtataccacaatctccaacgacaatctctcatttgtcatatcagataagaaggttgatactaactttatataccaacaaggaatgcttctagggttgggtgttttagaaacattgtttcgactcgagaaagataccggatcatctaacacggtattacatcttcacgtcgaaacagattgttgcgtgatcccgatgatagatcatcccaggatacccagctcccgcaagctagagctgagggcagagctatgtaccaacccattgatatatgataatgcacctttaattgacagagatgcaacaaggctatacacccagagccataggaggcaccttgtggaatttgttacatggtccacaccccaactatatcacattttagctaagtccacagcactatctatgattgacctggtaacaaaatttgagaaggaccatatgaatgaaatttcagctctcataggggatgacgatatcaatagtttcataactgagtttctgctcatagagccaagattattcactatctacttgggccagtgtgcggccatcaattgggcatttgatgtacattatcatagaccatcagggaaatatcagatgggtgagctgttgtcatcgttcctttctagaatgagcaaaggagtgtttaaggtgcttgtcaatgctctaagccacccaaagatctacaagaaattctggcattgtggtattatagagcctatccatggtccttcacttgatgctcaaaacttgcacacaactgtgtgcaacatggtttacacatgctatatgacctacctcgacctgttgttgaatgaagagttagaagagttcacatttctcttgtgtgaaagcgacgaggatgtagtaccggacagattcgacaacatccaggcaaaacacttatgtgttctggcagatttgtactgtcaaccagggacctgcccaccaattcgaggtctaagaccggtagagaaatgtgcagttctaaccgaccatatcaaggcagaggctatgttatctccagcaggatcttcgtggaacataaatccaattattgtagaccattactcatgctctctgacttatctccggcgaggatcgatcaaacagataagattgagagttgatccaggattcattttcgacgccctcgctgaggtaaatgtcagtcagccaaagatcggcagcaacaacatctcaaatatgagcatcaaggctttcagacccccacacgatgatgttgcaaaattgctcaaagatatcaacacaagcaagcacaatcttcccatttcagggggcaatctcgccaattatgaaatccatgctttccgcagaatcgggttgaactcatctgcttgctacaaagctgttgagatatcaacattaattaggagatgccttgagccaggggaggacggcttgttcttgggtgagggatcgggttctatgttgatcacttataaagagatacttaaactaaacaagtgcttctataatagtggggtttccgccaattctagatctggtcaaagggaattagcaccctatccctccgaagttggccttgtcgaacacagaatgggagtaggtaatattgtcaaagtgctctttaacgggaggcccgaagtcacgtgggtaggcagtgtagattgcttcaatttcatagttagtaatatccctacctctagtgtggggtttatccattcagatatagagaccttgcctgacaaagatactatagagaagctagaggaattggcagccatcttatcgatggctctgctcctgggcaaaataggatcaatactggtgattaagcttatgcctttcagcggggattttgttcagggatttataagttatgtagggtctcattatagagaagtgaaccttgtataccctagatacagcaacttcatctctactgaatcttatttggttatgacagatctcaaggctaaccggctaatgaatcctgaaaagattaagcagcagataattgaatcatctgtgaggacttcacctggacttataggtcacatcctatccattaagcaactaagctgcatacaagcaattgtgggagacgcagttagtagaggtgatatcaatcctactctgaaaaaacttacacctatagagcaggtgctgatcaattgcgggttggcaattaacggacctaagctgtgcaaagaattgatccaccatgatgttgcctcagggcaagatggattgcttaattctatactcatcctctacagggagttggcaagattcaaagacaaccaaagaagtcaacaagggatgttccacgcttaccccgtattggtaagtagcaggcaacgagaacttatatctaggatcacccgcaaattctgggggcacattcttctttactccgggaacaaaaagttgataaataagtttatccagaatctcaagtccggctatctgatactagacttacaccagaatatcttcgttaagaatctatccaagtcagagaaacagattattatgacggggggtttgaaacgtgagtgggtttttaaggtaacagtcaaggagaccaaagaatggtataagttagtcggatacagtgccctgattaaggactaattggttgaactccggaaccctaatcctgccctaggtggttaggcattatttgcaatatattaaagaaaactttgaaaatacgaagtttctattcccagctttgtctggtggccggcatggtcccagcctcctcgctggcgccggctgggcaacattccgaggggaccgtcccctcggtaatggcgaatgggacgcggccggtcgatcgacgatccggctgctaacaaagcccgaaaggaagctgagttggctgctgccaccgctgagcaataactagcataaccccttggggcctctaaacgggtcttgaggggttttttgctgaaaggaggaactatatccggatcgagatcaattctgtgagcgtatggcaaacgaaggaaaaatagttatagtagccgcactcgatgggacatttcaacgtaaaccgtttaataatattttgaatcttattccattatctgaaatggtggtaaaactaactgctgtgtgtatgaaatgctttaaggaggcttccttttctaaacgattgggtgaggaaaccgagatagaaataataggaggtaatgatatgtatcaatcggtgtgtagaaagtgttacatcgactcataatattatattttttatctaaaaaactaaaaataaacattgattaaattttaatataatacttaaaaatggatgttgtgtcgttagataaaccgtttatgtattttgaggaaattgataatgagttagattacgaaccagaaagtgcaaatgaggtcgcaaaaaaactgccgtatcaaggacagttaaaactattactaggagaattattttttcttagtaagttacagcgacacggtatattagatggtgccaccgtagtgtatataggatctgctcccggtacacatatacgttatttgagagatcatttctataatttaggagtgatcccgaaaggaagctgagttggctgctgccaccgctgagcaataactagcataaccccttggggcctctaaacgggtcttgaggggttttttgctgaaaggaggaacgcgcctgatgcggtattttctccttacgcatctgtgcggtatttcacaccgcatatatggtgcactctcagtacaatctgctctgatgccgcatagttaagccagccccgacacccgccaacacccgctgacgcgccctgacgggcttgtctgctcccggcatccgcttacagacaagctgtgaccgtctccgggagctgcatgtgtcagaggttttcaccgtcatcaccgaaacgcgcgagacgaaagggcctcgtgatacgcctatttttataggttaatgtcatgataataatggtttcttagacgtcaggtggcacttttcggggaaatgtgcgcggaacccctatttgtttatttttctaaatacattcaaatatgtatccgctcatgagacaataaccctgataaatgcttcaataatattgaaaaaggaagagtatgagtattcaacatttccgtgtcgcccttattcccttttttgcggcattttgccttcctgtttttgctcacccagaaacgctggtgaaagtaaaagatgctgaagatcagttgggtgcacgagtgggttacatcgaactggatctcaacagcggtaagatccttgagagttttcgccccgaagaacgttttccaatgatgagcacttttaaagttctgctatgtggcgcggtattatcccgtattgacgccgggcaagagcaactcggtcgccgcatacactattctcagaatgacttggttgagtactcaccagtcacagaaaagcatcttacggatggcatgacagtaagagaattatgcagtgctgccataaccatgagtgataacactgcggccaacttacttctgacaacgatcggaggaccgaaggagctaaccgcttttttgcacaacatgggggatcatgtaactcgccttgatcgttgggaaccggagctgaatgaagccataccaaacgacgagcgtgacaccacgatgcctgtagcaatggcaacaacgttgcgcaaactattaactggcgaactacttactctagcttcccggcaacaattaatagactggatggaggcggataaagttgcaggaccacttctgcgctcggcccttccggctggctggtttattgctgataaatctggagccggtgagcgtgggtctcgcggtatcattgcagcactggggccagatggtaagccctcccgtatcgtagttatctacacgacggggagtcaggcaactatggatgaacgaaatagacagatcgctgagataggtgcctcactgattaagcattggtaactgtcagaccaagtttactcatatatactttagattgatttaaaacttcatttttaatttaaaaggatctaggtgaagatcctttttgataatctcatgaccaaaatcccttaacgtgagttttcgttccactgagcgtcagaccccgtagaaaagatcaaaggatcttcttgagatcctttttttctgcgcgtaatctgctgcttgcaaacaaaaaaaccaccgctaccagcggtggtttgtttgccggatcaagagctaccaactctttttccgaaggtaactggcttcagcagagcgcagataccaaatactgtccttctagtgtagccgtagttaggccaccacttcaagaactctgtagcaccgcctacatacctcgctctgctaatcctgttaccagtggctgctgccagtggcgataagtcgtgtcttaccgggttggactcaagacgatagttaccggataaggcgcagcggtcgggctgaacggggggttcgtgcacacagcccagcttggagcgaacgacctacaccgaactgagatacctacagcgtgagcattgagaaagcgccacgcttcccgaagggagaaaggcggacaggtatccggtaagcggcagggtcggaacaggagagcgcacgagggagcttccagggggaaacgcctggtatctttatagtcctgtcgggtttcgccacctctgacttgagcgtcgatttttgtgatgctcgtcaggggggcggagcctatggaaaaacgccagcaacgcggcctttttacggttcctggccttttgctggccttttgctcacatgttctttcctgcgttatcccctgattctgtggataaccgtattaccgcctttgagtgagctgataccgctcgccgcagccgaacgaccgagcgcagcgagtcagtgagcgaggaagcggaagagcgcccaatacgcaaaccgcctctccccgcgcgttggccgattcattaatgcagctggcacgacaggtttcccgactggaaagcgggcagtgagcgcaacgcaattaatgtgagttagctcactcattaggcaccccaggctttacactttatgcttccggctcgtatgttgtgtggaattgtgagcggataacaatttcacacaggaaacagctatgaccatgattacgccaagcttacgcgtcctggcattatgcccagtacatgaccttatgggactttcctacttggcagtacatctacgtattagtcatcgctattaccatggtgatgcggttttggcagtacatcaatgggcgtggatagcggtttgactcacggggatttccaagtctccaccccattgacgtcaatgggagtttgttttggcaccaaaatcaacgggactttccaaaatgtcgtaacaactccgccccattgacgcaaatgggcggtaggcgtgtacggtgggaggtctatataagcagagctcgtttagtgaaccgtgg

SEQ ID NO: 126 - DNA, 37 bp, Artificial Sequence; identical to SEQ ID NO: 120
  Primer

SEQ ID NO: 127 - DNA, 28 bp, Artificial Sequence
  Primer
gcggccgcttaggtcacccggaagagtc

SEQ ID NO: 128 - DNA, 28 bp, Artificial Sequence
  Primer
gcggccgcttacacccggaagagtccca

SEQ ID NO: 129 - DNA, 29 bp, Artificial Sequence
  Primer
gcggccgcttaccggaagagtcccaagac

SEQ ID NO: 130 - DNA, 31 bp, Artificial Sequence
  Primer
gcggccgcttagaagagtcccaagactgtgg

SEQ ID NO: 131 - DNA, 30 bp, Artificial Sequence
  Primer
gcggccgcttagagtcccaagactgtggcg

SEQ ID NO: 132 - DNA, 29 bp, Artificial Sequence
  Primer
gcggccgcttacaagactgtggcgccctg

SEQ ID NO: 133 - DNA, 39 bp, Artificial Sequence
  Primer
agctgcgcaaacatggatccctcgttatcggttcccctg

SEQ ID NO: 134 - DNA, 40 bp, Artificial Sequence
  Primer
ggaaccgataacgagggatccatgtttgcgcagctggtgg

SEQ ID NO: 135 - DNA, 35 bp, Artificial Sequence; identical to SEQ ID NO: 123
  Primer

SEQ ID NO: 136 - DNA, 28 bp, Artificial Sequence
  Primer
gcgcccggatcccgcaccgagcctcggc

SEQ ID NO: 137 - DNA, 35 bp, Artificial Sequence
  Primer
gcgcccgcggccgcttattcccatgggttgtcggg

SEQ ID NO: 138 - DNA, 20841 bp, Artificial Sequence
  MV-control
accaaacaaagttgggtaaggatagttcaatcaatgatcatcttctagtgcacttaggattcaagatcctattatcagggacaagagcaggattagggatatctcgaggcgcgtgccaccatggtgacagggggaatggcaagcaagtgggatcagaagggtatggacattgcctatgaggaggcggccttaggttacaaagagggtggtgttcctattggcggatgtcttatcaataacaaagacggaagtgttctcggtcgtggtcacaacatgagatttcaaaagggatccgccacactacatggtgagatctccactttggaaaactgtgggagattagagggcaaagtgtacaaagataccactttgtatacgacgctgtctccatgcgacatgtgtacaggtgccatcatcatgtatggtattccacgctgtgttgtcggtgagaacgttaatttcaaaagtaagggcgagaaatatttacaaactagaggtcacgaggttgttgttgttgacgatgagaggtgtaaaaagatcatgaaacaatttatcgatgaaagacctcaggattggtttgaagatattggtgaggcttcggaaccatttaagaacgtctacttgctacctcaaacaaaccaattgctgggtttgtacaccatcatcagaaataagaatacaactagacctgatttcattttctactccgatagaatcatcagattgttggttgaagaaggtttgaaccatctacctgtgcaaaagcaaattgtggaaactgacaccaacgaaaacttcgaaggtgtctcattcatgggtaaaatctgtggtgtttccattgtcagagctggtgaatcgatggagcaaggattaagagactgttgtaggtctgtgcgtatcggtaaaattttaattcaaagggacgaggagactgctttaccaaagttattctacgaaaaattaccagaggatatatctgaaaggtatgtcttcctattagacccaatgctggccaccggtggtagtgctatcatggctacagaagtcttgattaagagaggtgttaagccagagagaatttacttcttaaacctaatctgtagtaaggaagggattgaaaaataccatgccgccttcccagaggtcagaattgttactggtgccctcgacagaggtctagatgaaaacaagtatctagttccagggttgggtgactttggtgacagatactactgtgtttaaacgcgccatccatcattgttataaaaaacttaggattcaagatcctattatcagggacaagagcaggattagggatatccgagatggccacacttttaaggagcttagcattgttcaaaagaaacaaggacaaaccacccattacatcaggatccggtggagccatcagaggaatcaaacacattattatagtaccaatccctggagattcctcaattaccactcgatccagacttctggaccggttggtgaggttaattggaaacccggatgtgagcgggcccaaactaacaggggcactaataggtatattatccttatttgtggagtctccaggtcaattgattcagaggatcaccgatgaccctgacgttagcataaggctgttagaggttgtccagagtgaccagtcacaatctggccttaccttcgcatcaagaggtaccaacatggaggatgaggcggaccaatacttttcacatgatgatccaattagtagtgatcaatccaggttcggatggttcgggaacaaggaaatctcagatattgaagtgcaagaccctgagggattcaacatgattctgggtaccatcctagcccaaatttgggtcttgctcgcaaaggcggttacggccccagacacggcagctgattcggagctaagaaggtggataaagtacacccaacaaagaagggtagttggtgaatttagattggagagaaaatggttggatgtggtgaggaacaggattgccgaggacctctccttacgccgattcatggtcgctctaatcctggatatcaagagaacacccggaaacaaacccaggattgctgaaatgatatgtgacattgatacatatatcgtagaggcaggattagccagttttatcctgactattaagtttgggatagaaactatgtatcctgctcttggactgcatgaatttgctggtgagttatccacacttgagtccttgatgaacctttaccagcaaatgggggaaactgcaccctacatggtaatcctggagaactcaattcagaacaagttcagtgcaggatcataccctctgctctggagctatgccatgggagtaggagtggaacttgaaaactccatgggaggtttgaactttggccgatcttactttgatccagcatattttagattagggcaagagatggtaaggaggtcagctggaaaggtcagttccacattggcatctgaactcggtatcactgccgaggatgcaaggcttgtttcagagattgcaatgcatactactgaggacaagatcagtagagcggttggacccagacaagcccaagtatcatttctacacggtgatcaaagtgagaatgagctaccgagattggggggcaaggaagataggagggtcaaacagagtcgaggagaagccagggagagctacagagaaaccgggcccagcagagcaagtgatgcgagagctgcccatcttccaaccggcacacccctagacattgacactgcaacggagtccagccaagatccgcaggacagtcgaaggtcagctgacgccctgcttaggctgcaagccatggcaggaatctcggaagaacaaggctcagacacggacacccctatagtgtacaatgacagaaatcttctagactaggtgcgagaggccgagggccagaacaacatccgcctaccatccatcattgttataaaaaacttaggaaccaggtccacacagccgccagcccatcaaccatccactcccacgattggagccaatggcagaagagcaggcacgccatgtcaaaaacggactggaatgcatccgggctctcaaggccgagcccatcggctcactggccatcgaggaagctatggcagcatggtcagaaatatcagacaacccaggacaggagcgagccacctgcagggaagagaaggcaggcagttcgggtctcagcaaaccatgcctctcagcaattggatcaactgaaggcggtgcacctcgcatccgcggtcagggacctggagagagcgatgacgacgctgaaactttgggaatccccccaagaaatctccaggcatcaagcactgggttacagtgttattacgtttatgatcacagcggtgaagcggttaagggaatccaagatgctgactctatcatggttcaatcaggccttgatggtgatagcaccctctcaggaggagacaatgaatctgaaaacagcgatgtggatattggcgaacctgataccgagggatatgctatcactgaccggggatctgctcccatctctatggggttcagggcttctgatgttgaaactgcagaaggaggggagatccacgagctcctgagactccaatccagaggcaacaactttccgaagcttgggaaaactctcaatgttcctccgcccccggaccccggtagggccagcacttccgggacacccattaaaaagggcacagacgcgagattagcctcatttggaacggagatcgcgtctttattgacaggtggtgcaacccaatgtgctcgaaagtcaccctcggaaccatcagggccaggtgcacctgcggggaatgtccccgagtgtgtgagcaatgccgcactgatacaggagtggacacccgaatctggtaccacaatctccccgagatcccagaataatgaagaagggggagactattatgatgatgagctgttctctgatgtccaagatattaaaacagccttggccaaaatacacgaggataatcagaagataatctccaagctagaatcactgctgttattgaagggagaagttgagtcaattaagaagcagatcaacaggcaaaatatcagcatatccaccctggaaggacacctctcaagcatcatgatcgccattcctggacttgggaaggatcccaacgaccccactgcagatgtcgaaatcaatcccgacttgaaacccatcataggcagagattcaggccgagcactggccgaagttctcaagaaacccgttgccagccgacaactccaaggaatgacaaatggacggaccagttccagaggacagctgctgaaggaatttcagctaaagccgatcgggaaaaagatgagctcagccgtcgggtttgttcctgacaccggccctgcatcacgcagtgtaatccgctccattataaaatccagccggctagaggaggatcggaagcgttacctgatgactctccttgatgatatcaaaggagccaatgatcttgccaagttccaccagatgctgatgaagataataatgaagtagctacagctcaacttacctgccaaccccatgccagtcgacccaactagtacaacctaaatccattataaaaaacttaggagcaaagtgattgcctcccaaggtccacaatgacagagacctacgacttcgacaagtcggcatgggacatcaaagggtcgatcgctccgatacaacccaccacctacagtgatggcaggctggtgccccaggtcagagtcatagatcctggtctaggcgacaggaaggatgaatgctttatgtacatgtttctgctgggggttgttgaggacagcgattccctagggcctccaatcgggcgagcatttgggttcctgcccttaggtgttggcagatccacagcaaagcccgaaaaactcctcaaagaggccactgagcttgacatagttgttagacgtacagcagggctcaatgaaaaactggtgttctacaacaacaccccactaactctcctcacaccttggagaaaggtcctaacaacagggagtgtcttcaacgcaaaccaagtgtgcaatgcggttaatctgataccgctcgataccccgcagaggttccgtgttgtttatatgagcatcacccgtctttcggataacgggtattacaccgttcctagaagaatgctggaattcagatcggtcaatgcagtggccttcaacctgctggtgacccttaggattgacaaggcgataggccctgggaagatcatcgacaatacagagcaacttcctgaggcaacatttatggtccacatcgggaacttcaggagaaagaagagtgaagtctactctgccgattattgcaaaatgaaaatcgaaaagatgggcctggtttttgcacttggtgggatagggggcaccagtcttcacattagaagcacaggcaaaatgagcaagactctccatgcacaactcgggttcaagaagaccttatgttacccgctgatggatatcaatgaagaccttaatcgattactctggaggagcagatgcaagatagtaagaatccaggcagttttgcagccatcagttcctcaagaattccgcatttacgacgacgtgatcataaatgatgaccaaggactattcaaagttctgtagaccgtagtgcccagcaatgcccgaaaacgacccccctcacaatgacagccagaaggcccggacaaaaaagccccctccgaaagactccacggaccaagcgagaggccagccagcagccgacggcaagcgcgaacaccaggcggccccagcacagaacagccctgacacaaggccaccaccagccaccccaatctgcatcctcctcgtgggacccccgaggaccaacccccaaggctgcccccgatccaaaccaccaaccgcatccccaccacccccgggaaagaaacccccagcaattggaaggcccctccccctcttcctcaacacaagaactccacaaccgaaccgcacaagcgaccgaggtgacccaaccgcaggcatccgactccctagacagatcctctctccccggcaaactaaacaaaacttagggccaaggaacatacacacccaacagaacccagaccccggcccacggcgccgcgcccccaacccccgacaaccagagggagcccccaaccaatcccgccggctcccccggtgcccacaggcagggacaccaacccccgaacagacccagcacccaaccatcgacaatccaagacgggggggcccccccaaaaaaaggcccccaggggccgacagccagcaccgcgaggaagcccacccaccccacacacgaccacggcaaccaaaccagaacccagaccaccctgggccaccagctcccagactcggccatcaccccgcagaaaggaaaggccacaacccgcgcaccccagccccgatccggcggggagccacccaacccgaaccagcacccaagagcgatccccgaaggacccccgaaccgcaaaggacatcagtatcccacagcctctccaagtcccccggtctcctcctcttctcgaagggaccaaaagatcaatccaccacacccgacgacactcaactccccacccctaaaggagacaccgggaatcccagaatcaagactcatccaatgtccatcatgggtctcaaggtgaacgtctctgccatattcatggcagtactgttaactctccaaacacccaccggtcaaatccattggggcaatctctctaagataggggtggtaggaataggaagtgcaagctacaaagttatgactcgttccagccatcaatcattagtcataaaattaatgcccaatataactctcctcaataactgcacgagggtagagattgcagaatacaggagactactgagaacagttttggaaccaattagagatgcacttaatgcaatgacccagaatataagaccggttcagagtgtagcttcaagtaggagacacaagagatttgcgggagtagtcctggcaggtgcggccctaggcgttgccacagctgctcagataacagccggcattgcacttcaccagtccatgctgaactctcaagccatcgacaatctgagagcgagcctggaaactactaatcaggcaattgagacaatcagacaagcagggcaggagatgatattggctgttcagggtgtccaagactacatcaataatgagctgataccgtctatgaaccaactatcttgtgatttaatcggccagaagctcgggctcaaattgctcagatactatacagaaatcctgtcattatttggccccagtttacgggaccccatatctgcggagatatctatccaggctttgagctatgcgcttggaggagacatcaataaggtgttagaaaagctcggatacagtggaggtgatttactgggcatcttagagagcggaggcatcaaggcccggataactcacgtcgacacagagtcctacttcattgtcctcagtatagcctatccgacgctgtccgagattaagggggtgattgtccaccggctagagggggtctcgtacaacataggctctcaagagtggtataccactgtgcccaagtatgttgcaacccaagggtaccttatctcgaattttgatgagtcatcgtgtactttcatgccagaggggactgtgtgcagccaaaatgccttgtacccgatgagtcctctgctccaagaatgcctccgggggtacaccaagtcctgtgctcgtacactcgtatccgggtcttttgggaaccggttcattttatcacaagggaacctaatagccaattgtgcatcaatcctttgcaagtgttacacaacaggaacgatcattaatcaagaccctgacaagatcctaacatacattgctgccgatcactgcccggtagtcgaggtgaacggcgtgaccatccaagtcgggagcaggaggtatccagacgctgtgtacttgcacagaattgacctcggtcctcccatatcattggagaggttggacgtagggacaaatctggggaatgcaattgctaagttggaggatgccaaggaattgttggagtcatcggaccagatattgaggagtatgaaaggtttatcgagcactagcatagtctacatcctgattgcagtgtgtcttggagggttgatagggatccccgctttaatatgttgctgcagggggcgttgtaacaaaaagggagaacaagttggtatgtcaagaccaggcctaaagcctgatcttacgggaacatcaaaatcctatgtaaggtcgctctgatcctctacaactcttgaaacacaaatgtcccacaagtctcctcttcgtcatcaagcaaccaccgcacccagcatcaagcccacctgaaattatctccggcttccctctggccgaacaatatcggtagttaatcaaaacttagggtgcaagatcatccacaatgtcaccacaacgagaccggataaatgccttctacaaagataacccccatcccaagggaagtaggatagtcattaacagagaacatcttatgattgatagaccttatgttttgctggctgttctgtttgtcatgtttctgagcttgatcgggttgctagccattgcaggcattagacttcatcgggcagccatctacaccgcagagatccataaaagcctcagcaccaatctagatgtaactaactcaatcgagcatcaggtcaaggacgtgctgacaccactcttcaaaatcatcggtgatgaagtgggcctgaggacacctcagagattcactgacctagtgaaattaatctctgacaagatcaagttccttaatccggatagggagtacgacttcagagatctcacttggtgtatcaacccgccagagagaatcaaattggattatgatcaatactgtgcagatgtggctgctgaagagctcatgaatgcattggtgaactcaactctactggagaccagaacaaccaatcagttcctagctgtctcaaagggaaactgctcagggcccactacaatcagaggtcaattctcaaacatgtcgctgtccctgttagacttgtatttaggtcgaggttacaatgtgtcatctatagtcactatgacatcccagggaatgtatgggggaacttacctagtggaaaagcctaatctgagcagcaaaaggtcagagttgtcacaactgagcatgtaccgagtgtttgaagtaggtgttatcagaaatccgggtttgggggctccggtgttccatatgacaaactatcttgagcaaccagtcagtaatgatctcagcaactgtatggtggctttgggggagctcaaactcgcagccctttgtcacggggaagattctatcacaattccctatcagggatcagggaaaggtgtcagcttccagctcgtcaagctaggtgtctggaaatccccaaccgacatgcaatcctgggtccccttatcaacggatgatccagtgatagacaggctttacctctcatctcacagaggtgttatcgctgacaatcaagcaaaatgggctgtcccgacaacacgaacagatgacaagttgcgaatggagacatgcttccaacaggcgtgtaagggtaaaatccaagcactctgcgagaatcccgagtgggcaccattgaaggataacaggattccttcatacggggtcttgtctgttgatctgagtctgacagttgagcttaaaatcaaaattgcttcgggattcgggccattgatcacacacggttcagggatggacctatacaaatccaaccacaacaatgtgtattggctgactatcccgccaatgaagaacctagccttaggtgtaatcaacacattggagtggataccgagattcaaggttagtccctacctcttcactgtcccaattaaggaagcaggcgaagactgccatgccccaacatacctacctgcggaggtggatggtgatgtcaaactcagttccaatctggtgattctacctggtcaagatctccaatatgttttggcaacctacgatacttccagggttgaacatgctgtggtttattacgtttacagcccaagccgctcattttcttacttttatccttttaggttgcctataaagggggtccccatcgaattacaagtggaatgcttcacatgggaccaaaaactctggtgccgtcacttctgtgtgcttgcggactcagaatctggtggacatatcactcactctgggatggtgggcatgggagtcagctgcacagtcacccgggaagatggaaccaatcgcagatagggctgctagtgaaccaatcacatgatgtcacccagacatcaggcatacccactagtgtgaaatagacatcagaattaagaaaaacgtagggtccaagtggttccccgttatggactcgctatctgtcaaccagatcttataccctgaagttcacctagatagcccgatagttaccaataagatagtagccatcctggagtatgctcgagtccctcacgcttacagcctggaggaccctacactgtgtcagaacatcaagcaccgcctaaaaaacggattttccaaccaaatgattataaacaatgtggaagttgggaatgtcatcaagtccaagcttaggagttatccggcccactctcatattccatatccaaattgtaatcaggatttatttaacatagaagacaaagagtcaacgaggaagatccgtgaactcctcaaaaaggggaattcgctgtactccaaagtcagtgataaggttttccaatgcttaagggacactaactcacggcttggcctaggctccgaattgagggaggacatcaaggagaaagttattaacttgggagtttacatgcacagctcccagtggtttgagccctttctgttttggtttacagtcaagactgagatgaggtcagtgattaaatcacaaacccatacttgccataggaggagacacacacctgtattcttcactggtagttcagttgagttgctaatctctcgtgaccttgttgctataatcagtaaagagtctcaacatgtatattacctgacatttgaactggttttgatgtattgtgatgtcatagaggggaggttaatgacagagaccgctatgactattgatgctaggtatacagagcttctaggaagagtcagatacatgtggaaactgatagatggtttcttccctgcactcgggaatccaacttatcaaattgtagccatgctggagcctctttcacttgcttacctgcagctgagggatataacagtagaactcagaggtgctttccttaaccactgctttactgaaatacatgatgttcttgaccaaaacgggttttctgatgaaggtacttatcatgagttaactgaagctctagattacattttcataactgatgacatacatctgacaggggagattttctcatttttcagaagtttcggccaccccagacttgaagcagtaacggctgctgaaaatgttaggaaatacatgaatcagcctaaagtcattgtgtatgagactctgatgaaaggtcatgccatattttgtggaatcataatcaacggctatcgtgacaggcacggaggcagttggccaccgctgaccctccccctgcatgctgcagacacaatccggaatgctcaagcttcaggtgaagggttaacacatgagcagtgcgttgataactggaaatcttttgctggagtgaaatttggctgctttatgcctcttagcctggatagtgatctgacaatgtacctaaaggacaaggcacttgctgctctccaaagggaatgggattcagtttacccgaaagagttcctgcgttacgaccctcccaagggaaccgggtcacggaggcttgtagatgttttccttaatgattcgagctttgacccatatgatgtgataatgtatgttgtaagtggagcttacctccatgaccctgagttcaacctgtcttacagcctgaaagaaaaggagatcaaggaaacaggtagactttttgctaaaatgacttacaaaatgagggcatgccaagtgattgctgaaaatctaatctcaaacgggattggcaaatattttaaggacaatgggatggccaaggatgagcacgatttgactaaggcactccacactctagctgtctcaggagtccccaaagatctcaaagaaagtcacaggggggggccagtcttaaaaacctactcccgaagcccagtccacacaagtaccaggaacgtgagagcagcaaaagggtttatagggttccctcaagtaattcggcaggaccaagacactgatcatccggagaatatggaagcttacgagacagtcagtgcatttatcacgactgatctcaagaagtactgccttaattggagatatgagaccatcagcttgtttgcacagaggctaaatgagatttacggattgccctcatttttccagtggctgcataagaggcttgagacctctgtcctgtatgtaagtgaccctcattgcccccccgaccttgacgcccatatcccgttatataaagtccccaatgatcaaatcttcattaagtaccctatgggaggtatagaagggtattgtcagaagctgtggaccatcagcaccattccctatctatacctggctgcttatgagagcggagtaaggattgcttcgttagtgcaaggggacaatcagaccatagccgtaacaaaaagggtacccagcacatggccctacaaccttaagaaacgggaagctgctagagtaactagagattactttgtaattcttaggcaaaggctacatgatattggccatcacctcaaggcaaatgagacaattgtttcatcacatttttttgtctattcaaaaggaatatattatgatgggctacttgtgtcccaatcactcaagagcatcgcaagatgtgtattctggtcagagactatagttgatgaaacaagggcagcatgcagtaatattgctacaacaatggctaaaagcatcgagagaggttatgaccgttaccttgcatattccctgaacgtcctaaaagtgatacagcaaattctgatctctcttggcttcacaatcaattcaaccatgacccgggatgtagtcatacccctcctcacaaacaacgacctcttaataaggatggcactgttgcccgctcctattggggggatgaattatctgaatatgagcaggctgtttgtcagaaacatcggtgatccagtaacatcatcaattgctgatctcaagagaatgattctcgcctcactaatgcctgaagagaccctccatcaagtaatgacacaacaaccgggggactcttcattcctagactgggctagcgacccttactcagcaaatcttgtatgtgtccagagcatcactagactcctcaagaacataactgcaaggtttgtcctgatccatagtccaaacccaatgttaaaaggattattccatgatgacagtaaagaagaggacgagggactggcggcattcctcatggacaggcatattatagtacctagggcagctcatgaaatcctggatcatagtgtcacaggggcaagagagtctattgcaggcatgctggataccacaaaaggcttgattcgagccagcatgaggaagggggggttaacctctcgagtgataaccagattgtccaattatgactatgaacaattcagagcagggatggtgctattgacaggaagaaagagaaatgtcctcattgacaaagagtcatgttcagtgcagctggcgagagctctaagaagccatatgtgggcgaggctagctcgaggacggcctatttacggccttgaggtccctgatgtactagaatctatgcgaggccaccttattcggcgtcatgagacatgtgtcatctgcgagtgtggatcagtcaactacggatggttttttgtcccctcgggttgccaactggatgatattgacaaggaaacatcatccttgagagtcccatatattggttctaccactgatgagagaacagacatgaagcttgccttcgtaagagccccaagtcgatccttgcgatctgctgttagaatagcaacagtgtactcatgggcttacggtgatgatgatagctcttggaacgaagcctggttgttggctaggcaaagggccaatgtgagcctggaggagctaagggtgatcactcccatctcaacttcgactaatttagcgcataggttgagggatcgtagcactcaagtgaaatactcaggtacatcccttgtccgagtggcgaggtataccacaatctccaacgacaatctctcatttgtcatatcagataagaaggttgatactaactttatataccaacaaggaatgcttctagggttgggtgttttagaaacattgtttcgactcgagaaagataccggatcatctaacacggtattacatcttcacgtcgaaacagattgttgcgtgatcccgatgatagatcatcccaggatacccagctcccgcaagctagagctgagggcagagctatgtaccaacccattgatatatgataatgcacctttaattgacagagatgcaacaaggctatacacccagagccataggaggcaccttgtggaatttgttacatggtccacaccccaactatatcacattttagctaagtccacagcactatctatgattgacctggtaacaaaatttgagaaggaccatatgaatgaaatttcagctctcataggggatgacgatatcaatagtttcataactgagtttctgctcatagagccaagattattcactatctacttgggccagtgtgcggccatcaattgggcatttgatgtacattatcatagaccatcagggaaatatcagatgggtgagctgttgtcatcgttcctttctagaatgagcaaaggagtgtttaaggtgcttgtcaatgctctaagccacccaaagatctacaagaaattctggcattgtggtattatagagcctatccatggtccttcacttgatgctcaaaacttgcacacaactgtgtgcaacatggtttacacatgctatatgacctacctcgacctgttgttgaatgaagagttagaagagttcacatttctcttgtgtgaaagcgacgaggatgtagtaccggacagattcgacaacatccaggcaaaacacttatgtgttctggcagatttgtactgtcaaccagggacctgcccaccaattcgaggtctaagaccggtagagaaatgtgcagttctaaccgaccatatcaaggcagaggctatgttatctccagcaggatcttcgtggaacataaatccaattattgtagaccattactcatgctctctgacttatctccggcgaggatcgatcaaacagataagattgagagttgatccaggattcattttcgacgccctcgctgaggtaaatgtcagtcagccaaagatcggcagcaacaacatctcaaatatgagcatcaaggctttcagacccccacacgatgatgttgcaaaattgctcaaagatatcaacacaagcaagcacaatcttcccatttcagggggcaatctcgccaattatgaaatccatgctttccgcagaatcgggttgaactcatctgcttgctacaaagctgttgagatatcaacattaattaggagatgccttgagccaggggaggacggcttgttcttgggtgagggatcgggttctatgttgatcacttataaagagatacttaaactaaacaagtgcttctataatagtggggtttccgccaattctagatctggtcaaagggaattagcaccctatccctccgaagttggccttgtcgaacacagaatgggagtaggtaatattgtcaaagtgctctttaacgggaggcccgaagtcacgtgggtaggcagtgtagattgcttcaatttcatagttagtaatatccctacctctagtgtggggtttatccattcagatatagagaccttgcctgacaaagatactatagagaagctagaggaattggcagccatcttatcgatggctctgctcctgggcaaaataggatcaatactggtgattaagcttatgcctttcagcggggattttgttcagggatttataagttatgtagggtctcattatagagaagtgaaccttgtataccctagatacagcaacttcatctctactgaatcttatttggttatgacagatctcaaggctaaccggctaatgaatcctgaaaagattaagcagcagataattgaatcatctgtgaggacttcacctggacttataggtcacatcctatccattaagcaactaagctgcatacaagcaattgtgggagacgcagttagtagaggtgatatcaatcctactctgaaaaaacttacacctatagagcaggtgctgatcaattgcgggttggcaattaacggacctaagctgtgcaaagaattgatccaccatgatgttgcctcagggcaagatggattgcttaattctatactcatcctctacagggagttggcaagattcaaagacaaccaaagaagtcaacaagggatgttccacgcttaccccgtattggtaagtagcaggcaacgagaacttatatctaggatcacccgcaaattctgggggcacattcttctttactccgggaacaaaaagttgataaataagtttatccagaatctcaagtccggctatctgatactagacttacaccagaatatcttcgttaagaatctatccaagtcagagaaacagattattatgacggggggtttgaaacgtgagtgggtttttaaggtaacagtcaaggagaccaaagaatggtataagttagtcggatacagtgccctgattaaggactaattggttgaactccggaaccctaatcctgccctaggtggttaggcattatttgcaatatattaaagaaaactttgaaaatacgaagtttctattcccagctttgtctggtggccggcatggtcccagcctcctcgctggcgccggctgggcaacattccgaggggaccgtcccctcggtaatggcgaatgggacgcggccggtcgatcgacgatccggctgctaacaaagcccgaaaggaagctgagttggctgctgccaccgctgagcaataactagcataaccccttggggcctctaaacgggtcttgaggggttttttgctgaaaggaggaactatatccggatcgagatcaattctgtgagcgtatggcaaacgaaggaaaaatagttatagtagccgcactcgatgggacatttcaacgtaaaccgtttaataatattttgaatcttattccattatctgaaatggtggtaaaactaactgctgtgtgtatgaaatgctttaaggaggcttccttttctaaacgattgggtgaggaaaccgagatagaaataataggaggtaatgatatgtatcaatcggtgtgtagaaagtgttacatcgactcataatattatattttttatctaaaaaactaaaaataaacattgattaaattttaatataatacttaaaaatggatgttgtgtcgttagataaaccgtttatgtattttgaggaaattgataatgagttagattacgaaccagaaagtgcaaatgaggtcgcaaaaaaactgccgtatcaaggacagttaaaactattactaggagaattattttttcttagtaagttacagcgacacggtatattagatggtgccaccgtagtgtatataggatctgctcccggtacacatatacgttatttgagagatcatttctataatttaggagtgatcccgaaaggaagctgagttggctgctgccaccgctgagcaataactagcataaccccttggggcctctaaacgggtcttgaggggttttttgctgaaaggaggaacgcgcctgatgcggtattttctccttacgcatctgtgcggtatttcacaccgcatatatggtgcactctcagtacaatctgctctgatgccgcatagttaagccagccccgacacccgccaacacccgctgacgcgccctgacgggcttgtctgctcccggcatccgcttacagacaagctgtgaccgtctccgggagctgcatgtgtcagaggttttcaccgtcatcaccgaaacgcgcgagacgaaagggcctcgtgatacgcctatttttataggttaatgtcatgataataatggtttcttagacgtcaggtggcacttttcggggaaatgtgcgcggaacccctatttgtttatttttctaaatacattcaaatatgtatccgctcatgagacaataaccctgataaatgcttcaataatattgaaaaaggaagagtatgagtattcaacatttccgtgtcgcccttattcccttttttgcggcattttgccttcctgtttttgctcacccagaaacgctggtgaaagtaaaagatgctgaagatcagttgggtgcacgagtgggttacatcgaactggatctcaacagcggtaagatccttgagagttttcgccccgaagaacgttttccaatgatgagcacttttaaagttctgctatgtggcgcggtattatcccgtattgacgccgggcaagagcaactcggtcgccgcatacactattctcagaatgacttggttgagtactcaccagtcacagaaaagcatcttacggatggcatgacagtaagagaattatgcagtgctgccataaccatgagtgataacactgcggccaacttacttctgacaacgatcggaggaccgaaggagctaaccgcttttttgcacaacatgggggatcatgtaactcgccttgatcgttgggaaccggagctgaatgaagccataccaaacgacgagcgtgacaccacgatgcctgtagcaatggcaacaacgttgcgcaaactattaactggcgaactacttactctagcttcccggcaacaattaatagactggatggaggcggataaagttgcaggaccacttctgcgctcggcccttccggctggctggtttattgctgataaatctggagccggtgagcgtgggtctcgcggtatcattgcagcactggggccagatggtaagccctcccgtatcgtagttatctacacgacggggagtcaggcaactatggatgaacgaaatagacagatcgctgagataggtgcctcactgattaagcattggtaactgtcagaccaagtttactcatatatactttagattgatttaaaacttcatttttaatttaaaaggatctaggtgaagatcctttttgataatctcatgaccaaaatcccttaacgtgagttttcgttccactgagcgtcagaccccgtagaaaagatcaaaggatcttcttgagatcctttttttctgcgcgtaatctgctgcttgcaaacaaaaaaaccaccgctaccagcggtggtttgtttgccggatcaagagctaccaactctttttccgaaggtaactggcttcagcagagcgcagataccaaatactgtccttctagtgtagccgtagttaggccaccacttcaagaactctgtagcaccgcctacatacctcgctctgctaatcctgttaccagtggctgctgccagtggcgataagtcgtgtcttaccgggttggactcaagacgatagttaccggataaggcgcagcggtcgggctgaacggggggttcgtgcacacagcccagcttggagcgaacgacctacaccgaactgagatacctacagcgtgagcattgagaaagcgccacgcttcccgaagggagaaaggcggacaggtatccggtaagcggcagggtcggaacaggagagcgcacgagggagcttccagggggaaacgcctggtatctttatagtcctgtcgggtttcgccacctctgacttgagcgtcgatttttgtgatgctcgtcaggggggcggagcctatggaaaaacgccagcaacgcggcctttttacggttcctggccttttgctggccttttgctcacatgttctttcctgcgttatcccctgattctgtggataaccgtattaccgcctttgagtgagctgataccgctcgccgcagccgaacgaccgagcgcagcgagtcagtgagcgaggaagcggaagagcgcccaatacgcaaaccgcctctccccgcgcgttggccgattcattaatgcagctggcacgacaggtttcccgactggaaagcgggcagtgagcgcaacgcaattaatgtgagttagctcactcattaggcaccccaggctttacactttatgcttccggctcgtatgttgtgtggaattgtgagcggataacaatttcacacaggaaacagctatgaccatgattacgccaagcttacgcgtcctggcattatgcccagtacatgaccttatgggactttcctacttggcagtacatctacgtattagtcatcgctattaccatggtgatgcggttttggcagtacatcaatgggcgtggatagcggtttgactcacggggatttccaagtctccaccccattgacgtcaatgggagtttgttttggcaccaaaatcaacgggactttccaaaatgtcgtaacaactccgccccattgacgcaaatgggcggtaggcgtgtacggtgggaggtctatataagcagagctcgtttagtgaaccgtgg

SEQ ID NO: 139 - DNA, 20613 bp, Artificial Sequence
  MV-C
accaaacaaagttgggtaaggatagttcaatcaatgatcatcttctagtgcacttaggattcaagatcctattatcagggacaagagcaggattagggatatccgagatggccacacttttaaggagcttagcattgttcaaaagaaacaaggacaaaccacccattacatcaggatccggtggagccatcagaggaatcaaacacattattatagtaccaatccctggagattcctcaattaccactcgatccagacttctggaccggttggtgaggttaattggaaacccggatgtgagcgggcccaaactaacaggggcactaataggtatattatccttatttgtggagtctccaggtcaattgattcagaggatcaccgatgaccctgacgttagcataaggctgttagaggttgtccagagtgaccagtcacaatctggccttaccttcgcatcaagaggtaccaacatggaggatgaggcggaccaatacttttcacatgatgatccaattagtagtgatcaatccaggttcggatggttcgggaacaaggaaatctcagatattgaagtgcaagaccctgagggattcaacatgattctgggtaccatcctagcccaaatttgggtcttgctcgcaaaggcggttacggccccagacacggcagctgattcggagctaagaaggtggataaagtacacccaacaaagaagggtagttggtgaatttagattggagagaaaatggttggatgtggtgaggaacaggattgccgaggacctctccttacgccgattcatggtcgctctaatcctggatatcaagagaacacccggaaacaaacccaggattgctgaaatgatatgtgacattgatacatatatcgtagaggcaggattagccagttttatcctgactattaagtttgggatagaaactatgtatcctgctcttggactgcatgaatttgctggtgagttatccacacttgagtccttgatgaacctttaccagcaaatgggggaaactgcaccctacatggtaatcctggagaactcaattcagaacaagttcagtgcaggatcataccctctgctctggagctatgccatgggagtaggagtggaacttgaaaactccatgggaggtttgaactttggccgatcttactttgatccagcatattttagattagggcaagagatggtaaggaggtcagctggaaaggtcagttccacattggcatctgaactcggtatcactgccgaggatgcaaggcttgtttcagagattgcaatgcatactactgaggacaagatcagtagagcggttggacccagacaagcccaagtatcatttctacacggtgatcaaagtgagaatgagctaccgagattggggggcaaggaagataggagggtcaaacagagtcgaggagaagccagggagagctacagagaaaccgggcccagcagagcaagtgatgcgagagctgcccatcttccaaccggcacacccctagacattgacactgcaacggagtccagccaagatccgcaggacagtcgaaggtcagctgacgccctgcttaggctgcaagccatggcaggaatctcggaagaacaaggctcagacacggacacccctatagtgtacaatgacagaaatcttctagactaggtgcgagaggccgagggccagaacaacatccgcctaccatccatcattgttataaaaaacttaggaaccaggtccacacagccgccagcccatcaaccatccactcccacgattggagccaatggcagaagagcaggcacgccatgtcaaaaacggactggaatgcatccgggctctcaaggccgagcccatcggctcactggccatcgaggaagctatggcagcatggtcagaaatatcagacaacccaggacaggagcgagccacctgcagggaagagaaggcaggcagttcgggtctcagcaaaccatgcctctcagcaattggatcaactgaaggcggtgcacctcgcatccgcggtcagggacctggagagagcgatgacgacgctgaaactttgggaatccccccaagaaatctccaggcatcaagcactgggttacagtgttattacgtttatgatcacagcggtgaagcggttaagggaatccaagatgctgactctatcatggttcaatcaggccttgatggtgatagcaccctctcaggaggagacaatgaatctgaaaacagcgatgtggatattggcgaacctgataccgagggatatgctatcactgaccggggatctgctcccatctctatggggttcagggcttctgatgttgaaactgcagaaggaggggagatccacgagctcctgagactccaatccagaggcaacaactttccgaagcttgggaaaactctcaatgttcctccgcccccggaccccggtagggccagcacttccgggacacccattaaaaagggcacagacgcgagattagcctcatttggaacggagatcgcgtctttattgacaggtggtgcaacccaatgtgctcgaaagtcaccctcggaaccatcagggccaggtgcacctgcggggaatgtccccgagtgtgtgagcaatgccgcactgatacaggagtggacacccgaatctggtaccacaatctccccgagatcccagaataatgaagaagggggagactattatgatgatgagctgttctctgatgtccaagatattaaaacagccttggccaaaatacacgaggataatcagaagataatctccaagctagaatcactgctgttattgaagggagaagttgagtcaattaagaagcagatcaacaggcaaaatatcagcatatccaccctggaaggacacctctcaagcatcatgatcgccattcctggacttgggaaggatcccaacgaccccactgcagatgtcgaaatcaatcccgacttgaaacccatcataggcagagattcaggccgagcactggccgaagttctcaagaaacccgttgccagccgacaactccaaggaatgacaaatggacggaccagttccagaggacagctgctgaaggaatttcagctaaagccgatcgggaaaaagatgagctcagccgtcgggtttgttcctgacaccggccctgcatcacgcagtgtaatccgctccattataaaatccagccggctagaggaggatcggaagcgttacctgatgactctccttgatgatatcaaaggagccaatgatcttgccaagttccaccagatgctgatgaagataataatgaagtagctacagctcaacttacctgccaaccccatgccagtcgacccaactagtacaacctaaatccattataaaaaacttaggagcaaagtgattgcctcccaaggtccacaatgacagagacctacgacttcgacaagtcggcatgggacatcaaagggtcgatcgctccgatacaacccaccacctacagtgatggcaggctggtgccccaggtcagagtcatagatcctggtctaggcgacaggaaggatgaatgctttatgtacatgtttctgctgggggttgttgaggacagcgattccctagggcctccaatcgggcgagcatttgggttcctgcccttaggtgttggcagatccacagcaaagcccgaaaaactcctcaaagaggccactgagcttgacatagttgttagacgtacagcagggctcaatgaaaaactggtgttctacaacaacaccccactaactctcctcacaccttggagaaaggtcctaacaacagggagtgtcttcaacgcaaaccaagtgtgcaatgcggttaatctgataccgctcgataccccgcagaggttccgtgttgtttatatgagcatcacccgtctttcggataacgggtattacaccgttcctagaagaatgctggaattcagatcggtcaatgcagtggccttcaacctgctggtgacccttaggattgacaaggcgataggccctgggaagatcatcgacaatacagagcaacttcctgaggcaacatttatggtccacatcgggaacttcaggagaaagaagagtgaagtctactctgccgattattgcaaaatgaaaatcgaaaagatgggcctggtttttgcacttggtgggatagggggcaccagtcttcacattagaagcacaggcaaaatgagcaagactctccatgcacaactcgggttcaagaagaccttatgttacccgctgatggatatcaatgaagaccttaatcgattactctggaggagcagatgcaagatagtaagaatccaggcagttttgcagccatcagttcctcaagaattccgcatttacgacgacgtgatcataaatgatgaccaaggactattcaaagttctgtagaccgtagtgcccagcaatgcccgaaaacgacccccctcacaatgacagccagaaggcccggacaaaaaagccccctccgaaagactccacggaccaagcgagaggccagccagcagccgacggcaagcgcgaacaccaggcggccccagcacagaacagccctgacacaaggccaccaccagccaccccaatctgcatcctcctcgtgggacccccgaggaccaacccccaaggctgcccccgatccaaaccaccaaccgcatccccaccacccccgggaaagaaacccccagcaattggaaggcccctccccctcttcctcaacacaagaactccacaaccgaaccgcacaagcgaccgaggtgacccaaccgcaggcatccgactccctagacagatcctctctccccggcaaactaaacaaaacttagggccaaggaacatacacacccaacagaacccagaccccggcccacggcgccgcgcccccaacccccgacaaccagagggagcccccaaccaatcccgccggctcccccggtgcccacaggcagggacaccaacccccgaacagacccagcacccaaccatcgacaatccaagacgggggggcccccccaaaaaaaggcccccaggggccgacagccagcaccgcgaggaagcccacccaccccacacacgaccacggcaaccaaaccagaacccagaccaccctgggccaccagctcccagactcggccatcaccccgcagaaaggaaaggccacaacccgcgcaccccagccccgatccggcggggagccacccaacccgaaccagcacccaagagcgatccccgaaggacccccgaaccgcaaaggacatcagtatcccacagcctctccaagtcccccggtctcctcctcttctcgaagggaccaaaagatcaatccaccacacccgacgacactcaactccccacccctaaaggagacaccgggaatcccagaatcaagactcatccaatgtccatcatgggtctcaaggtgaacgtctctgccatattcatggcagtactgttaactctccaaacacccaccggtcaaatccattggggcaatctctctaagataggggtggtaggaataggaagtgcaagctacaaagttatgactcgttccagccatcaatcattagtcataaaattaatgcccaatataactctcctcaataactgcacgagggtagagattgcagaatacaggagactactgagaacagttttggaaccaattagagatgcacttaatgcaatgacccagaatataagaccggttcagagtgtagcttcaagtaggagacacaagagatttgcgggagtagtcctggcaggtgcggccctaggcgttgccacagctgctcagataacagccggcattgcacttcaccagtccatgctgaactctcaagccatcgacaatctgagagcgagcctggaaactactaatcaggcaattgagacaatcagacaagcagggcaggagatgatattggctgttcagggtgtccaagactacatcaataatgagctgataccgtctatgaaccaactatcttgtgatttaatcggccagaagctcgggctcaaattgctcagatactatacagaaatcctgtcattatttggccccagtttacgggaccccatatctgcggagatatctatccaggctttgagctatgcgcttggaggagacatcaataaggtgttagaaaagctcggatacagtggaggtgatttactgggcatcttagagagcggaggcatcaaggcccggataactcacgtcgacacagagtcctacttcattgtcctcagtatagcctatccgacgctgtccgagattaagggggtgattgtccaccggctagagggggtctcgtacaacataggctctcaagagtggtataccactgtgcccaagtatgttgcaacccaagggtaccttatctcgaattttgatgagtcatcgtgtactttcatgccagaggggactgtgtgcagccaaaatgccttgtacccgatgagtcctctgctccaagaatgcctccgggggtacaccaagtcctgtgctcgtacactcgtatccgggtcttttgggaaccggttcattttatcacaagggaacctaatagccaattgtgcatcaatcctttgcaagtgttacacaacaggaacgatcattaatcaagaccctgacaagatcctaacatacattgctgccgatcactgcccggtagtcgaggtgaacggcgtgaccatccaagtcgggagcaggaggtatccagacgctgtgtacttgcacagaattgacctcggtcctcccatatcattggagaggttggacgtagggacaaatctggggaatgcaattgctaagttggaggatgccaaggaattgttggagtcatcggaccagatattgaggagtatgaaaggtttatcgagcactagcatagtctacatcctgattgcagtgtgtcttggagggttgatagggatccccgctttaatatgttgctgcagggggcgttgtaacaaaaagggagaacaagttggtatgtcaagaccaggcctaaagcctgatcttacgggaacatcaaaatcctatgtaaggtcgctctgatcctctacaactcttgaaacacaaatgtcccacaagtctcctcttcgtcatcaagcaaccaccgcacccagcatcaagcccacctgaaattatctccggcttccctctggccgaacaatatcggtagttaatcaaaacttagggtgcaagatcatccacaatgtcaccacaacgagaccggataaatgccttctacaaagataacccccatcccaagggaagtaggatagtcattaacagagaacatcttatgattgatagaccttatgttttgctggctgttctgtttgtcatgtttctgagcttgatcgggttgctagccattgcaggcattagacttcatcgggcagccatctacaccgcagagatccataaaagcctcagcaccaatctagatgtaactaactcaatcgagcatcaggtcaaggacgtgctgacaccactcttcaaaatcatcggtgatgaagtgggcctgaggacacctcagagattcactgacctagtgaaattaatctctgacaagatcaagttccttaatccggatagggagtacgacttcagagatctcacttggtgtatcaacccgccagagagaatcaaattggattatgatcaatactgtgcagatgtggctgctgaagagctcatgaatgcattggtgaactcaactctactggagaccagaacaaccaatcagttcctagctgtctcaaagggaaactgctcagggcccactacaatcagaggtcaattctcaaacatgtcgctgtccctgttagacttgtatttaggtcgaggttacaatgtgtcatctatagtcactatgacatcccagggaatgtatgggggaacttacctagtggaaaagcctaatctgagcagcaaaaggtcagagttgtcacaactgagcatgtaccgagtgtttgaagtaggtgttatcagaaatccgggtttgggggctccggtgttccatatgacaaactatcttgagcaaccagtcagtaatgatctcagcaactgtatggtggctttgggggagctcaaactcgcagccctttgtcacggggaagattctatcacaattccctatcagggatcagggaaaggtgtcagcttccagctcgtcaagctaggtgtctggaaatccccaaccgacatgcaatcctgggtccccttatcaacggatgatccagtgatagacaggctttacctctcatctcacagaggtgttatcgctgacaatcaagcaaaatgggctgtcccgacaacacgaacagatgacaagttgcgaatggagacatgcttccaacaggcgtgtaagggtaaaatccaagcactctgcgagaatcccgagtgggcaccattgaaggataacaggattccttcatacggggtcttgtctgttgatctgagtctgacagttgagcttaaaatcaaaattgcttcgggattcgggccattgatcacacacggttcagggatggacctatacaaatccaaccacaacaatgtgtattggctgactatcccgccaatgaagaacctagccttaggtgtaatcaacacattggagtggataccgagattcaaggttagtccctacctcttcactgtcccaattaaggaagcaggcgaagactgccatgccccaacatacctacctgcggaggtggatggtgatgtcaaactcagttccaatctggtgattctacctggtcaagatctccaatatgttttggcaacctacgatacttccagggttgaacatgctgtggtttattacgtttacagcccaagccgctcattttcttacttttatccttttaggttgcctataaagggggtccccatcgaattacaagtggaatgcttcacatgggaccaaaaactctggtgccgtcacttctgtgtgcttgcggactcagaatctggtggacatatcactcactctgggatggtgggcatgggagtcagctgcacagtcacccgggaagatggaaccaatcgcagatagggctgctagtgaaccaatcacatgatgtcacccagacatcaggcatacccactagtctaccctccatcattgttataaaaaacttaggaaccaggtccacacagccgccagcccatcaacgcgtacggccaccatgcccatggggtctctgcaaccgctggccaccttgtacctgctggggatgctggtcgcttcctgcctcggaggcgttcgactttgggctacaagacaggcaatgctgggccaggtccatgaggttcctgaggggtggctcattttcgtggccgagcaggaggagctgtatgttcgcgtgcaaaacggctttaggaaggtccagctggaagcgcggacacctttgcccaggggaaccgataacgagggatcccgcaccgagcctcggccagcgctcacaatcaccacctcgcccaacctgggtacccgagagaataatgcagaccaggtcacccctgtttcccacattggctgccccaacactacacaacagggctctcctgtgttcgccaagctactggctaaaaaccaagcatcgttgtgcaatacaactctgaactggcacagccaagatggagctgggagctcatacctatctcaaggtctgaggtacgaagaagacaaaaaggagttggtggtagacagtcccgggctctactacgtatttttggaactgaagctcagtccaacattcacaaacacaggccacaaggtgcagggctgggtctctcttgttttgcaagcaaagcctcaggtagatgactttgacaacttggccctgacagtggaactgttcccttgctccatggagaacaagttagtggaccgttcctggagtcaactgttgctcctgaaggctggccaccgcctcagtgtgggtctgagggcttatctgcatggagcccaggatgcatacagagactgggagctgtcttatcccaacaccaccagctttggactctttcttgtgaaacccgacaacccatgggaataatgagcgcgcagcgcttagacgtctcgcgatcgatgctagtgtgaaatagacatcagaattaagaaaaacgtagggtccaagtggttccccgttatggactcgctatctgtcaaccagatcttataccctgaagttcacctagatagcccgatagttaccaataagatagtagccatcctggagtatgctcgagtccctcacgcttacagcctggaggaccctacactgtgtcagaacatcaagcaccgcctaaaaaacggattttccaaccaaatgattataaacaatgtggaagttgggaatgtcatcaagtccaagcttaggagttatccggcccactctcatattccatatccaaattgtaatcaggatttatttaacatagaagacaaagagtcaacgaggaagatccgtgaactcctcaaaaaggggaattcgctgtactccaaagtcagtgataaggttttccaatgcttaagggacactaactcacggcttggcctaggctccgaattgagggaggacatcaaggagaaagttattaacttgggagtttacatgcacagctcccagtggtttgagccctttctgttttggtttacagtcaagactgagatgaggtcagtgattaaatcacaaacccatacttgccataggaggagacacacacctgtattcttcactggtagttcagttgagttgctaatctctcgtgaccttgttgctataatcagtaaagagtctcaacatgtatattacctgacatttgaactggttttgatgtattgtgatgtcatagaggggaggttaatgacagagaccgctatgactattgatgctaggtatacagagcttctaggaagagtcagatacatgtggaaactgatagatggtttcttccctgcactcgggaatccaacttatcaaattgtagccatgctggagcctctttcacttgcttacctgcagctgagggatataacagtagaactcagaggtgctttccttaaccactgctttactgaaatacatgatgttcttgaccaaaacgggttttctgatgaaggtacttatcatgagttaactgaagctctagattacattttcataactgatgacatacatctgacaggggagattttctcatttttcagaagtttcggccaccccagacttgaagcagtaacggctgctgaaaatgttaggaaatacatgaatcagcctaaagtcattgtgtatgagactctgatgaaaggtcatgccatattttgtggaatcataatcaacggctatcgtgacaggcacggaggcagttggccaccgctgaccctccccctgcatgctgcagacacaatccggaatgctcaagcttcaggtgaagggttaacacatgagcagtgcgttgataactggaaatcttttgctggagtgaaatttggctgctttatgcctcttagcctggatagtgatctgacaatgtacctaaaggacaaggcacttgctgctctccaaagggaatgggattcagtttacccgaaagagttcctgcgttacgaccctcccaagggaaccgggtcacggaggcttgtagatgttttccttaatgattcgagctttgacccatatgatgtgataatgtatgttgtaagtggagcttacctccatgaccctgagttcaacctgtcttacagcctgaaagaaaaggagatcaaggaaacaggtagactttttgctaaaatgacttacaaaatgagggcatgccaagtgattgctgaaaatctaatctcaaacgggattggcaaatattttaaggacaatgggatggccaaggatgagcacgatttgactaaggcactccacactctagctgtctcaggagtccccaaagatctcaaagaaagtcacaggggggggccagtcttaaaaacctactcccgaagcccagtccacacaagtaccaggaacgtgagagcagcaaaagggtttatagggttccctcaagtaattcggcaggaccaagacactgatcatccggagaatatggaagcttacgagacagtcagtgcatttatcacgactgatctcaagaagtactgccttaattggagatatgagaccatcagcttgtttgcacagaggctaaatgagatttacggattgccctcatttttccagtggctgcataagaggcttgagacctctgtcctgtatgtaagtgaccctcattgcccccccgaccttgacgcccatatcccgttatataaagtccccaatgatcaaatcttcattaagtaccctatgggaggtatagaagggtattgtcagaagctgtggaccatcagcaccattccctatctatacctggctgcttatgagagcggagtaaggattgcttcgttagtgcaaggggacaatcagaccatagccgtaacaaaaagggtacccagcacatggccctacaaccttaagaaacgggaagctgctagagtaactagagattactttgtaattcttaggcaaaggctacatgatattggccatcacctcaaggcaaatgagacaattgtttcatcacatttttttgtctattcaaaaggaatatattatgatgggctacttgtgtcccaatcactcaagagcatcgcaagatgtgtattctggtcagagactatagttgatgaaacaagggcagcatgcagtaatattgctacaacaatggctaaaagcatcgagagaggttatgaccgttaccttgcatattccctgaacgtcctaaaagtgatacagcaaattctgatctctcttggcttcacaatcaattcaaccatgacccgggatgtagtcatacccctcctcacaaacaacgacctcttaataaggatggcactgttgcccgctcctattggggggatgaattatctgaatatgagcaggctgtttgtcagaaacatcggtgatccagtaacatcatcaattgctgatctcaagagaatgattctcgcctcactaatgcctgaagagaccctccatcaagtaatgacacaacaaccgggggactcttcattcctagactgggctagcgacccttactcagcaaatcttgtatgtgtccagagcatcactagactcctcaagaacataactgcaaggtttgtcctgatccatagtccaaacccaatgttaaaaggattattccatgatgacagtaaagaagaggacgagggactggcggcattcctcatggacaggcatattatagtacctagggcagctcatgaaatcctggatcatagtgtcacaggggcaagagagtctattgcaggcatgctggataccacaaaaggcttgattcgagccagcatgaggaagggggggttaacctctcgagtgataaccagattgtccaattatgactatgaacaattcagagcagggatggtgctattgacaggaagaaagagaaatgtcctcattgacaaagagtcatgttcagtgcagctggcgagagctctaagaagccatatgtgggcgaggctagctcgaggacggcctatttacggccttgaggtccctgatgtactagaatctatgcgaggccaccttattcggcgtcatgagacatgtgtcatctgcgagtgtggatcagtcaactacggatggttttttgtcccctcgggttgccaactggatgatattgacaaggaaacatcatccttgagagtcccatatattggttctaccactgatgagagaacagacatgaagcttgccttcgtaagagccccaagtcgatccttgcgatctgctgttagaatagcaacagtgtactcatgggcttacggtgatgatgatagctcttggaacgaagcctggttgttggctaggcaaagggccaatgtgagcctggaggagctaagggtgatcactcccatctcaacttcgactaatttagcgcataggttgagggatcgtagcactcaagtgaaatactcaggtacatcccttgtccgagtggcgaggtataccacaatctccaacgacaatctctcatttgtcatatcagataagaaggttgatactaactttatataccaacaaggaatgcttctagggttgggtgttttagaaacattgtttcgactcgagaaagataccggatcatctaacacggtattacatcttcacgtcgaaacagattgttgcgtgatcccgatgatagatcatcccaggatacccagctcccgcaagctagagctgagggcagagctatgtaccaacccattgatatatgataatgcacctttaattgacagagatgcaacaaggctatacacccagagccataggaggcaccttgtggaatttgttacatggtccacaccccaactatatcacattttagctaagtccacagcactatctatgattgacctggtaacaaaatttgagaaggaccatatgaatgaaatttcagctctcataggggatgacgatatcaatagtttcataactgagtttctgctcatagagccaagattattcactatctacttgggccagtgtgcggccatcaattgggcatttgatgtacattatcatagaccatcagggaaatatcagatgggtgagctgttgtcatcgttcctttctagaatgagcaaaggagtgtttaaggtgcttgtcaatgctctaagccacccaaagatctacaagaaattctggcattgtggtattatagagcctatccatggtccttcacttgatgctcaaaacttgcacacaactgtgtgcaacatggtttacacatgctatatgacctacctcgacctgttgttgaatgaagagttagaagagttcacatttctcttgtgtgaaagcgacgaggatgtagtaccggacagattcgacaacatccaggcaaaacacttatgtgttctggcagatttgtactgtcaaccagggacctgcccaccaattcgaggtctaagaccggtagagaaatgtgcagttctaaccgaccatatcaaggcagaggctatgttatctccagcaggatcttcgtggaacataaatccaattattgtagaccattactcatgctctctgacttatctccggcgaggatcgatcaaacagataagattgagagttgatccaggattcattttcgacgccctcgctgaggtaaatgtcagtcagccaaagatcggcagcaacaacatctcaaatatgagcatcaaggctttcagacccccacacgatgatgttgcaaaattgctcaaagatatcaacacaagcaagcacaatcttcccatttcagggggcaatctcgccaattatgaaatccatgctttccgcagaatcgggttgaactcatctgcttgctacaaagctgttgagatatcaacattaattaggagatgccttgagccaggggaggacggcttgttcttgggtgagggatcgggttctatgttgatcacttataaagagatacttaaactaaacaagtgcttctataatagtggggtttccgccaattctagatctggtcaaagggaattagcaccctatccctccgaagttggccttgtcgaacacagaatgggagtaggtaatattgtcaaagtgctctttaacgggaggcccgaagtcacgtgggtaggcagtgtagattgcttcaatttcatagttagtaatatccctacctctagtgtggggtttatccattcagatatagagaccttgcctgacaaagatactatagagaagctagaggaattggcagccatcttatcgatggctctgctcctgggcaaaataggatcaatactggtgattaagcttatgcctttcagcggggattttgttcagggatttataagttatgtagggtctcattatagagaagtgaaccttgtataccctagatacagcaacttcatctctactgaatcttatttggttatgacagatctcaaggctaaccggctaatgaatcctgaaaagattaagcagcagataattgaatcatctgtgaggacttcacctggacttataggtcacatcctatccattaagcaactaagctgcatacaagcaattgtgggagacgcagttagtagaggtgatatcaatcctactctgaaaaaacttacacctatagagcaggtgctgatcaattgcgggttggcaattaacggacctaagctgtgcaaagaattgatccaccatgatgttgcctcagggcaagatggattgcttaattctatactcatcctctacagggagttggcaagattcaaagacaaccaaagaagtcaacaagggatgttccacgcttaccccgtattggtaagtagcaggcaacgagaacttatatctaggatcacccgcaaattctgggggcacattcttctttactccgggaacaaaaagttgataaataagtttatccagaatctcaagtccggctatctgatactagacttacaccagaatatcttcgttaagaatctatccaagtcagagaaacagattattatgacggggggtttgaaacgtgagtgggtttttaaggtaacagtcaaggagaccaaagaatggtataagttagtcggatacagtgccctgattaaggactaattggttgaactccggaaccctaatcctgccctaggtggttaggcattatttgcaatatattaaagaaaactttgaaaatacgaagtttctattcccagctttgtctggtggccggcatggtcccagcctcctcgctggcgccggctgggcaacattccgaggggaccgtcccctcggtaatggcgaatgggacgcggccggtcgatcgacgatccggctgctaacaaagcccgaaaggaagctgagttggctgctgccaccgctgagcaataactagcataaccccttggggcctctaaacgggtcttgaggggttttttgctgaaaggaggaactatatccggatcgagatcaattctgtgagcgtatggcaaacgaaggaaaaatagttatagtagccgcactcgatgggacatttcaacgtaaaccgtttaataatattttgaatcttattccattatctgaaatggtggtaaaactaactgctgtgtgtatgaaatgctttaaggaggcttccttttctaaacgattgggtgaggaaaccgagatagaaataataggaggtaatgatatgtatcaatcggtgtgtagaaagtgttacatcgactcataatattatattttttatctaaaaaactaaaaataaacattgattaaattttaatataatacttaaaaatggatgttgtgtcgttagataaaccgtttatgtattttgaggaaattgataatgagttagattacgaaccagaaagtgcaaatgaggtcgcaaaaaaactgccgtatcaaggacagttaaaactattactaggagaattattttttcttagtaagttacagcgacacggtatattagatggtgccaccgtagtgtatataggatctgctcccggtacacatatacgttatttgagagatcatttctataatttaggagtgatcccgaaaggaagctgagttggctgctgccaccgctgagcaataactagcataaccccttggggcctctaaacgggtcttgaggggttttttgctgaaaggaggaacgcgcctgatgcggtattttctccttacgcatctgtgcggtatttcacaccgcatatatggtgcactctcagtacaatctgctctgatgccgcatagttaagccagccccgacacccgccaacacccgctgacgcgccctgacgggcttgtctgctcccggcatccgcttacagacaagctgtgaccgtctccgggagctgcatgtgtcagaggttttcaccgtcatcaccgaaacgcgcgagacgaaagggcctcgtgatacgcctatttttataggttaatgtcatgataataatggtttcttagacgtcaggtggcacttttcggggaaatgtgcgcggaacccctatttgtttatttttctaaatacattcaaatatgtatccgctcatgagacaataaccctgataaatgcttcaataatattgaaaaaggaagagtatgagtattcaacatttccgtgtcgcccttattcccttttttgcggcattttgccttcctgtttttgctcacccagaaacgctggtgaaagtaaaagatgctgaagatcagttgggtgcacgagtgggttacatcgaactggatctcaacagcggtaagatccttgagagttttcgccccgaagaacgttttccaatgatgagcacttttaaagttctgctatgtggcgcggtattatcccgtattgacgccgggcaagagcaactcggtcgccgcatacactattctcagaatgacttggttgagtactcaccagtcacagaaaagcatcttacggatggcatgacagtaagagaattatgcagtgctgccataaccatgagtgataacactgcggccaacttacttctgacaacgatcggaggaccgaaggagctaaccgcttttttgcacaacatgggggatcatgtaactcgccttgatcgttgggaaccggagctgaatgaagccataccaaacgacgagcgtgacaccacgatgcctgtagcaatggcaacaacgttgcgcaaactattaactggcgaactacttactctagcttcccggcaacaattaatagactggatggaggcggataaagttgcaggaccacttctgcgctcggcccttccggctggctggtttattgctgataaatctggagccggtgagcgtgggtctcgcggtatcattgcagcactggggccagatggtaagccctcccgtatcgtagttatctacacgacggggagtcaggcaactatggatgaacgaaatagacagatcgctgagataggtgcctcactgattaagcattggtaactgtcagaccaagtttactcatatatactttagattgatttaaaacttcatttttaatttaaaaggatctaggtgaagatcctttttgataatctcatgaccaaaatcccttaacgtgagttttcgttccactgagcgtcagaccccgtagaaaagatcaaaggatcttcttgagatcctttttttctgcgcgtaatctgctgcttgcaaacaaaaaaaccaccgctaccagcggtggtttgtttgccggatcaagagctaccaactctttttccgaaggtaactggcttcagcagagcgcagataccaaatactgtccttctagtgtagccgtagttaggccaccacttcaagaactctgtagcaccgcctacatacctcgctctgctaatcctgttaccagtggctgctgccagtggcgataagtcgtgtcttaccgggttggactcaagacgatagttaccggataaggcgcagcggtcgggctgaacggggggttcgtgcacacagcccagcttggagcgaacgacctacaccgaactgagatacctacagcgtgagcattgagaaagcgccacgcttcccgaagggagaaaggcggacaggtatccggtaagcggcagggtcggaacaggagagcgcacgagggagcttccagggggaaacgcctggtatctttatagtcctgtcgggtttcgccacctctgacttgagcgtcgatttttgtgatgctcgtcaggggggcggagcctatggaaaaacgccagcaacgcggcctttttacggttcctggccttttgctggccttttgctcacatgttctttcctgcgttatcccctgattctgtggataaccgtattaccgcctttgagtgagctgataccgctcgccgcagccgaacgaccgagcgcagcgagtcagtgagcgaggaagcggaagagcgcccaatacgcaaaccgcctctccccgcgcgttggccgattcattaatgcagctggcacgacaggtttcccgactggaaagcgggcagtgagcgcaacgcaattaatgtgagttagctcactcattaggcaccccaggctttacactttatgcttccggctcgtatgttgtgtggaattgtgagcggataacaatttcacacaggaaacagctatgaccatgattacgccaagcttacgcgtcctggcattatgcccagtacatgaccttatgggactttcctacttggcagtacatctacgtattagtcatcgctattaccatggtgatgcggttttggcagtacatcaatgggcgtggatagcggtttgactcacggggatttccaagtctccaccccattgacgtcaatgggagtttgttttggcaccaaaatcaacgggactttccaaaatgtcgtaacaactccgccccattgacgcaaatgggcggtaggcgtgtacggtgggaggtctatataagcagagctcgtttagtgaaccgtgg

SEQ ID NO: 140 - DNA, 870 bp, Artificial Sequence
  murine s4-1BBL-TriXVIII
atgcccatggggtctctgcaaccgctggccaccttgtacctgctggggatgctggtcgcttcctgcctcggaggcgttcgactttgggctacaagacaggcaatgctgggccaggtccatgaggttcctgaggggtggctcattttcgtggccgagcaggaggagctgtatgttcgcgtgcaaaacggctttaggaaggtccagctggaagcgcggacacctttgcccaggggaaccgataacgagggatcccgcaccgagcctcggccagcgctcacaatcaccacctcgcccaacctgggtacccgagagaataatgcagaccaggtcacccctgtttcccacattggctgccccaacactacacaacagggctctcctgtgttcgccaagctactggctaaaaaccaagcatcgttgtgcaatacaactctgaactggcacagccaagatggagctgggagctcatacctatctcaaggtctgaggtacgaagaagacaaaaaggagttggtggtagacagtcccgggctctactacgtatttttggaactgaagctcagtccaacattcacaaacacaggccacaaggtgcagggctgggtctctcttgttttgcaagcaaagcctcaggtagatgactttgacaacttggccctgacagtggaactgttcccttgctccatggagaacaagttagtggaccgttcctggagtcaactgttgctcctgaaggctggccaccgcctcagtgtgggtctgagggcttatctgcatggagcccaggatgcatacagagactgggagctgtcttatcccaacaccaccagctttggactctttcttgtgaaacccgacaacccatgggaa

SEQ ID NO: 141 - DNA, 762 bp, Artificial Sequence
  Codon optimized s4-1BBL-TriXVIII (Insert of MV-B)
atgcctatgggatctctccaacccctggcaacactctacttgttggggatgcttgtcgctagttgtctcggaggcgttagactctgggccacacgacaggctatgctcgggcaggttcacgaggtgcccgaaggatggctgatctttgtagctgaacaggaggagctgtacgtgagggttcagaatggctttagaaaggttcaactggaagcaagaactccactgccacgcggaacagacaacgagggatccctcgaccttaggcaaggcatgttcgcacagctggttgcgcagaatgtccttttgattgatggaccacttagctggtattctgatcctgggcttgccggcgtttctcttactggtggcctgagctataaagaagatacaaaggagctggtggttgccaaggccggggtctattacgtgttctttcaactcgagttgaggcgagttgtggctggggaaggatctggatcagtttccctggcgcttcatctccagccgcttagaagcgcagctggagctgcagcccttgcccttaccgtggatcttccaccagcgagctctgaggcccgcaatagcgcttttgggtttcaaggaagactcctccacctttccgctggacagcggcttggtgttcacctgcatacggaggctcgggcacggcatgcatggcaactcacacaaggggccacagtgttggggctgtttcgggtgactccagaaattcccgccggactgcctagtccaagaagcgaa

SEQ ID NO: 142 - DNA, 795 bp, Artificial Sequence
  s4-1BBLsh90-241-TriXVIII
atgcccatggggtctctgcaaccgctggccaccttgtacctgctggggatgctggtcgcttcctgcctcggaggctctggctccaactggagccacccccagttcgagaagggaggttctgggggccatcaccatcaccatcacggcggttcagggggaggcgttcgactttgggctacaagacaggcaatgctgggccaggtccatgaggttcctgaggggtggctcattttcgtggccgagcaggaggagctgtatgttcgcgtgcaaaacggctttaggaaggtccagctggaagcgcggacacctttgcccaggggaaccgataacgagggatccggcatgtttgcgcagctggtggcccaaaatgttctgctgatcgatgggcccctgagctggtacagtgacccaggcctggcaggcgtgtccctgacggggggcctgagctacaaagaggacacgaaggagctggtggtggccaaggctggagtctactatgtcttctttcaactagagctgcggcgcgtggtggccggcgagggctcaggctccgtttcacttgcgctgcacctgcagccactgcgctctgctgctggggccgccgccctggctttgaccgtggacctgccacccgcctcctccgaggctcggaactcggccttcggtttccagggccgcttgctgcacctgagtgccggccagcgcctgggcgtccatcttcacactgaggccagggcacgccatgcctggcagcttacccagggcgccacagtcttgggactcttccgggtgacc

SEQ ID NO: 143 - DNA, 792 bp, Artificial Sequence
  s4-1BBLsh90-240-TriXVIII
atgcccatggggtctctgcaaccgctggccaccttgtacctgctggggatgctggtcgcttcctgcctcggaggctctggctccaactggagccacccccagttcgagaagggaggttctgggggccatcaccatcaccatcacggcggttcagggggaggcgttcgactttgggctacaagacaggcaatgctgggccaggtccatgaggttcctgaggggtggctcattttcgtggccgagcaggaggagctgtatgttcgcgtgcaaaacggctttaggaaggtccagctggaagcgcggacacctttgcccaggggaaccgataacgagggatccggcatgtttgcgcagctggtggcccaaaatgttctgctgatcgatgggcccctgagctggtacagtgacccaggcctggcaggcgtgtccctgacggggggcctgagctacaaagaggacacgaaggagctggtggtggccaaggctggagtctactatgtcttctttcaactagagctgcggcgcgtggtggccggcgagggctcaggctccgtttcacttgcgctgcacctgcagccactgcgctctgctgctggggccgccgccctggctttgaccgtggacctgccacccgcctcctccgaggctcggaactcggccttcggtttccagggccgcttgctgcacctgagtgccggccagcgcctgggcgtccatcttcacactgaggccagggcacgccatgcctggcagcttacccagggcgccacagtcttgggactcttccgggtg

SEQ ID NO: 144 - DNA, 789 bp, Artificial Sequence
  s4-1BBLsh90-239-TriXVIII
atgcccatggggtctctgcaaccgctggccaccttgtacctgctggggatgctggtcgcttcctgcctcggaggctctggctccaactggagccacccccagttcgagaagggaggttctgggggccatcaccatcaccatcacggcggttcagggggaggcgttcgactttgggctacaagacaggcaatgctgggccaggtccatgaggttcctgaggggtggctcattttcgtggccgagcaggaggagctgtatgttcgcgtgcaaaacggctttaggaaggtccagctggaagcgcggacacctttgcccaggggaaccgataacgagggatccggcatgtttgcgcagctggtggcccaaaatgttctgctgatcgatgggcccctgagctggtacagtgacccaggcctggcaggcgtgtccctgacggggggcctgagctacaaagaggacacgaaggagctggtggtggccaaggctggagtctactatgtcttctttcaactagagctgcggcgcgtggtggccggcgagggctcaggctccgtttcacttgcgctgcacctgcagccactgcgctctgctgctggggccgccgccctggctttgaccgtggacctgccacccgcctcctccgaggctcggaactcggccttcggtttccagggccgcttgctgcacctgagtgccggccagcgcctgggcgtccatcttcacactgaggccagggcacgccatgcctggcagcttacccagggcgccacagtcttgggactcttccgg

SEQ ID NO: 145 - DNA, 786 bp, Artificial Sequence
  s4-1BBLsh90-238-TriXVIII
atgcccatggggtctctgcaaccgctggccaccttgtacctgctggggatgctggtcgcttcctgcctcggaggctctggctccaactggagccacccccagttcgagaagggaggttctgggggccatcaccatcaccatcacggcggttcagggggaggcgttcgactttgggctacaagacaggcaatgctgggccaggtccatgaggttcctgaggggtggctcattttcgtggccgagcaggaggagctgtatgttcgcgtgcaaaacggctttaggaaggtccagctggaagcgcggacacctttgcccaggggaaccgataacgagggatccggcatgtttgcgcagctggtggcccaaaatgttctgctgatcgatgggcccctgagctggtacagtgacccaggcctggcaggcgtgtccctgacggggggcctgagctacaaagaggacacgaaggagctggtggtggccaaggctggagtctactatgtcttctttcaactagagctgcggcgcgtggtggccggcgagggctcaggctccgtttcacttgcgctgcacctgcagccactgcgctctgctgctggggccgccgccctggctttgaccgtggacctgccacccgcctcctccgaggctcggaactcggccttcggtttccagggccgcttgctgcacctgagtgccggccagcgcctgggcgtccatcttcacactgaggccagggcacgccatgcctggcagcttacccagggcgccacagtcttgggactcttc

SEQ ID NO: 146 - DNA, 783 bp, Artificial Sequence
  s4-1BBLsh90-237-TriXVIII
atgcccatggggtctctgcaaccgctggccaccttgtacctgctggggatgctggtcgcttcctgcctcggaggctctggctccaactggagccacccccagttcgagaagggaggttctgggggccatcaccatcaccatcacggcggttcagggggaggcgttcgactttgggctacaagacaggcaatgctgggccaggtccatgaggttcctgaggggtggctcattttcgtggccgagcaggaggagctgtatgttcgcgtgcaaaacggctttaggaaggtccagctggaagcgcggacacctttgcccaggggaaccgataacgagggatccggcatgtttgcgcagctggtggcccaaaatgttctgctgatcgatgggcccctgagctggtacagtgacccaggcctggcaggcgtgtccctgacggggggcctgagctacaaagaggacacgaaggagctggtggtggccaaggctggagtctactatgtcttctttcaactagagctgcggcgcgtggtggccggcgagggctcaggctccgtttcacttgcgctgcacctgcagccactgcgctctgctgctggggccgccgccctggctttgaccgtggacctgccacccgcctcctccgaggctcggaactcggccttcggtttccagggccgcttgctgcacctgagtgccggccagcgcctgggcgtccatcttcacactgaggccagggcacgccatgcctggcagcttacccagggcgccacagtcttgggactc

SEQ ID NO: 147 - DNA, 777 bp, Artificial Sequence
  s4-1BBLsh90-235-TriXVIII
atgcccatggggtctctgcaaccgctggccaccttgtacctgctggggatgctggtcgcttcctgcctcggaggctctggctccaactggagccacccccagttcgagaagggaggttctgggggccatcaccatcaccatcacggcggttcagggggaggcgttcgactttgggctacaagacaggcaatgctgggccaggtccatgaggttcctgaggggtggctcattttcgtggccgagcaggaggagctgtatgttcgcgtgcaaaacggctttaggaaggtccagctggaagcgcggacacctttgcccaggggaaccgataacgagggatccggcatgtttgcgcagctggtggcccaaaatgttctgctgatcgatgggcccctgagctggtacagtgacccaggcctggcaggcgtgtccctgacggggggcctgagctacaaagaggacacgaaggagctggtggtggccaaggctggagtctactatgtcttctttcaactagagctgcggcgcgtggtggccggcgagggctcaggctccgtttcacttgcgctgcacctgcagccactgcgctctgctgctggggccgccgccctggctttgaccgtggacctgccacccgcctcctccgaggctcggaactcggccttcggtttccagggccgcttgctgcacctgagtgccggccagcgcctgggcgtccatcttcacactgaggccagggcacgccatgcctggcagcttacccagggcgccacagtcttg

SEQ ID NO: 148 - DNA, 795 bp, Artificial Sequence
  s4-1BBLsh91-242-TriXVIII
atgcccatggggtctctgcaaccgctggccaccttgtacctgctggggatgctggtcgcttcctgcctcggaggctctggctccaactggagccacccccagttcgagaagggaggttctgggggccatcaccatcaccatcacggcggttcagggggaggcgttcgactttgggctacaagacaggcaatgctgggccaggtccatgaggttcctgaggggtggctcattttcgtggccgagcaggaggagctgtatgttcgcgtgcaaaacggctttaggaaggtccagctggaagcgcggacacctttgcccaggggaaccgataacgagggatccatgtttgcgcagctggtggcccaaaatgttctgctgatcgatgggcccctgagctggtacagtgacccaggcctggcaggcgtgtccctgacggggggcctgagctacaaagaggacacgaaggagctggtggtggccaaggctggagtctactatgtcttctttcaactagagctgcggcgcgtggtggccggcgagggctcaggctccgtttcacttgcgctgcacctgcagccactgcgctctgctgctggggccgccgccctggctttgaccgtggacctgccacccgcctcctccgaggctcggaactcggccttcggtttccagggccgcttgctgcacctgagtgccggccagcgcctgggcgtccatcttcacactgaggccagggcacgccatgcctggcagcttacccagggcgccacagtcttgggactcttccgggtgaccccc

SEQ ID NO: 149 - protein, 152 aa, Artificial Sequence
  s4-1BBLsh90-241
GMFAQLVAQNVLLIDGPLSWYSDPGLAGVSLTGGLSYKEDTKELVVAKAGVYYVFFQLELRRVVAGEGSGSVSLALHLQPLRSAAGAAALALTVDLPPASSEARNSAFGFQGRLLHLSAGQRLGVHLHTEARARHAWQLTQGATVLGLFRVT

SEQ ID NO: 150 - protein, 151 aa, Artificial Sequence
  s4-1BBLsh90-240
GMFAQLVAQNVLLIDGPLSWYSDPGLAGVSLTGGLSYKEDTKELVVAKAGVYYVFFQLELRRVVAGEGSGSVSLALHLQPLRSAAGAAALALTVDLPPASSEARNSAFGFQGRLLHLSAGQRLGVHLHTEARARHAWQLTQGATVLGLFRV

SEQ ID NO: 151 - protein, 150 aa, Artificial Sequence
  s4-1BBLsh90-239
GMFAQLVAQNVLLIDGPLSWYSDPGLAGVSLTGGLSYKEDTKELVVAKAGVYYVFFQLELRRVVAGEGSGSVSLALHLQPLRSAAGAAALALTVDLPPASSEARNSAFGFQGRLLHLSAGQRLGVHLHTEARARHAWQLTQGATVLGLFR

SEQ ID NO: 152 - protein, 149 aa, Artificial Sequence
  s4-1BBLsh90-238
GMFAQLVAQNVLLIDGPLSWYSDPGLAGVSLTGGLSYKEDTKELVVAKAGVYYVFFQLELRRVVAGEGSGSVSLALHLQPLRSAAGAAALALTVDLPPASSEARNSAFGFQGRLLHLSAGQRLGVHLHTEARARHAWQLTQGATVLGLF

SEQ ID NO: 153 - protein, 148 aa, Artificial Sequence
  s4-1BBLsh90-237
GMFAQLVAQNVLLIDGPLSWYSDPGLAGVSLTGGLSYKEDTKELVVAKAGVYYVFFQLELRRVVAGEGSGSVSLALHLQPLRSAAGAAALALTVDLPPASSEARNSAFGFQGRLLHLSAGQRLGVHLHTEARARHAWQLTQGATVLGL

SEQ ID NO: 154 - protein, 146 aa, Artificial Sequence
  s4-1BBLsh90-235
GMFAQLVAQNVLLIDGPLSWYSDPGLAGVSLTGGLSYKEDTKELVVAKAGVYYVFFQLELRRVVAGEGSGSVSLALHLQPLRSAAGAAALALTVDLPPASSEARNSAFGFQGRLLHLSAGQRLGVHLHTEARARHAWQLTQGATVL

SEQ ID NO: 155 - protein, 152 aa, Artificial Sequence
  s4-1BBLsh91-242
MFAQLVAQNVLLIDGPLSWYSDPGLAGVSLTGGLSYKEDTKELVVAKAGVYYVFFQLELRRVVAGEGSGSVSLALHLQPLRSAAGAAALALTVDLPPASSEARNSAFGFQGRLLHLSAGQRLGVHLHTEARARHAWQLTQGATVLGLFRVTP

1. A costimulatory polypeptide comprising
(i) at least one 4-1BBL ectodomain and a trimerization domain, and/or
(ii) at least one 4-1BBL ectodomain and at least one leader sequence, and further at least one affinity tag;
wherein each 4-1BBL ectodomain consists of a minimal Tumor Necrosis Factor (TNF) Homology Domain of less than 170 amino acids that comprises amino acids 90 to 240 of SEQ ID NO: 2, or a sequence having at least 92%, 93%, 94%, 95%, 96%, 97%, 98% or 99% sequence identity to amino acids 90 to 240 of SEQ ID NO: 2;
wherein the polypeptide binds to 4-1BB on the surface of a 4-1BB expressing cell and thus triggers 4-1BB-mediated immune cell stimulation.

2. The costimulatory polypeptide of claim 1, wherein each 4-1BBL ectodomain consists of the minimal Tumor Necrosis Factor (TNF) Homology Domain according to a sequence having at least 92%, 93%, 94%, 95%, 96%, 97%, 98% or 99% sequence identity to SEQ ID NO: 1, or SEQ ID NOs: 149 to 155.

3. The costimulatory polypeptide of claim 1 comprising at least three 4-1BBL ectodomains, and further comprising at least one trimerization domain.

4. The costimulatory polypeptide of claim 3, wherein the trimerization domain is selected from SEQ ID NO: 7 and SEQ ID NO: 8.

5. The costimulatory polypeptide of claim 1, wherein the trimerization domain is a human or humanized trimerization domain.

6. The costimulatory polypeptide of claim 1, wherein the polypeptide comprises at least one linker, wherein the at least one linker is individually selected from the group consisting of SEQ ID NOs: 9 to 16, or a sequence having at least 90%, 91%, 92%, 93%, 94%, 95%, 96%, 97%, 98% or 99% sequence identity to any one of the sequences SEQ ID NOs: 9 to 16, or a nucleic acid sequence encoding the same.

7. The costimulatory polypeptide of claim 1, wherein the costimulatory polypeptide is encoded by a nucleic acid sequence selected from the group consisting of SEQ ID NOs: 47, 49, 51, 53, 55, 57, 59, 61, 63, 65, 67, 69, 71, 73, 75, 77 or 79 or a sequence having at least 70%, 71%, 72%, 73%, 74%, 75%, 76%, 77%, 78%, 79%, 80%, 81%, 82%, 83%, 84%, 85%, 86%, 87%, 88%, 89%, 90%, 91%, 92%, 93%, 94%, 95%, 96%, 97%, 98% or 99% sequence identity to any one of the sequences SEQ ID NOs: 47, 49, 51, 53, 55, 57, 59, 61, 63, 65, 67, 69, 71, 73, 75, 77 or 79.

8. A vector comprising a nucleic acid sequence encoding the costimulatory polypeptide of claim 1.

9. The vector according to claim 8, wherein the vector comprises a sequence encoding an expression vector, or an oncolytic virus, wherein the oncolytic virus is selected from the group consisting of a vaccinia virus, a myxoma virus, an adenovirus, a herpes virus, a reovirus, a Zika virus, a vesicular stomatitis virus, a parvovirus, a poliovirus, an influenza virus, an arenavirus, a coxsackie virus, a semliki forest virus, a sindbis virus, a maraba virus, a seneca valley virus, a Newcastle disease virus, a mumps virus, and a measles virus, or combinations or a chimera thereof.

10. An oncolytic virus encoded by a vector, wherein the oncolytic virus comprises the costimulatory polypeptide of claim 1 as payload.

11. A method of producing the costimulatory polypeptide of claim 1, the method comprising:
(i) providing a vector encoding the costimulatory polypeptide and introducing the vector into a host cell;
(ii) culturing the cell under conditions suitable for expression of the costimulatory polypeptide;
(iii) isolating and purifying the costimulatory polypeptide; and
(iv) obtaining the costimulatory polypeptide.

12. A method of producing an oncolytic virus expressing the costimulatory polypeptide of claim 1, the method comprising:
(i) providing a vector encoding an oncolytic virus and the costimulatory polypeptide and introducing the vector into a host cell,
(ii) culturing the cell under conditions suitable for expression and thus replication of the oncolytic virus,
(iii) rescuing the oncolytic virus;
(iv) purifying the oncolytic virus as obtained in step (ii) or (iii); and
(v) obtaining the oncolytic virus.

13. A pharmaceutical composition comprising the costimulatory polypeptide of claim 1 and/or an oncolytic virus expressing the costimulatory polypeptide of claim 1, further comprising at least one pharmaceutically acceptable carrier and/or further comprising, in combination with the costimulatory polypeptide, at least one further pharmaceutically active ingredient, the further pharmaceutically active ingredient being selected from at least one chemotherapeutic agent, at least one antibody, antibody-like molecule or antibody mimetic, or at least one checkpoint modulator, particularly a checkpoint inhibitor.

14. A method of treating cancer in a subject, the method comprising administering the costimulatory polypeptide of claim 1, and/or an oncolytic virus expressing the costimulatory polypeptide of claim 1, to the subject.

15. The method of claim 14, wherein the cancer is selected from bladder cancer, breast cancer, prostate cancer, basal cell carcinoma, biliary tract cancer, bone cancer, brain and central nervous system cancer (e.g., glioma), adenocarcinomas, lung cancer, cervical cancer, choriocarcinoma, colon and rectum cancer, connective tissue cancer, cancer of the digestive system; cancer of the small intestine and cecum; endometrial cancer, esophageal cancer; eye cancer; cancer of the head and neck; gastric cancer; intra-epithelial neoplasm; kidney cancer; larynx cancer; leukemia; liver cancer; gall bladder cancer lung cancer (e.g., small cell and non-small cell); lymphoma including Hodgkin's and Non-Hodgkin's lymphoma; melanoma; myeloma, neuroblastoma, oral cavity cancer (e.g., lip, tongue, mouth, and pharynx); cancer of the salivary glands; ovarian cancer; pancreatic cancer, retinoblastoma; rhabdomyosarcoma; rectal cancer, renal cancer, cancer of the respiratory system; sarcoma, skin cancer; stomach cancer, testicular cancer, thyroid cancer; uterine cancer, cancer of the urinary system, as well as other carcinomas and sarcomas.

16. The method of claim 15, wherein the cancer is a cold tumor or a hot tumor.

17. A kit comprising the costimulatory polypeptide of claim 1, or an oncolytic virus expressing the costimulatory polypeptide of claim 1, wherein the kit comprises further reagents.

18. An in vitro method for stimulating 4-1BB expressing cells, the in vitro method comprising using an effective amount of the costimulatory polypeptide of claim 1, or using an effective amount of oncolytic virus expressing the costimulatory polypeptide of claim 1.

19. The costimulatory polypeptide of claim 1, wherein each 4-1BBL ectodomain consists of the minimal Tumor Necrosis Factor (TNF) Homology Domain according to SEQ ID NO: 1, or any one of SEQ ID NOs: 149 to 155.

20. The costimulatory polypeptide of claim 6, wherein the costimulatory polypeptide additionally comprises at least one affinity tag and/or at least one protease cleavage tag and/or at least one inhibitory domain and/or at least one leader sequence.
